United States Patent Application Publication US 2025/0195589 A1 - sequence listing, part 9

SEQ ID NO: 18 - DNA, 2634625 bp, Lactobacillus crispatus (residues 1-1,317,313 of 2,634,625)
  source 1..2634625: mol_type = genomic DNA
ttgttcgacattaataaattttgggaacactttaatgacgagatgcgtgctcgtttcaacgaagttgcctacaatgcatggttcaaaaatactaaacctatttcatataatggaaaaacacatgaattaaaaattttagttcaaaatcctgtttctaaaggttactgggaaaagaatctatcttctcaattgattcaatctgcctacggttatgccgacatcgagatcttacctgtatttaaaatatctgaagatgcggatattacagaaaggatcgtaacacctgcgccaaagcgtgatgcgcaagttcaacagcctaatttgccagaaaaagaattcactaaagacttgaagttaaacgaaaaatacacttttgataacttcgttcaaggtgagggaaacaagttggccgccggtgctgcacttgctgtagccgacagtcctggtagtttttacaatcctttatttatttttggtggcgttggtttaggtaaaacacacctgatgcaagctgttgggcatcaaatgctagcagagcgacctaacgcaaaagttgtctatatacagagtgaaacttttgttaatgacttcattaattccatcaaaaataaaacgcaggacaaattccgcgaaaaatacagaacttgtgacctgcttttagttgatgatattcaattttttgccaaaaaagaggggattcaagaggaattcttccatacttttgagacactttataacgatcaaaaacagatcgtaatgactagcgatcggttgcctacagaaatcccagatctatcagagcgtttagtttctcgatttacatggggcttgcaagtcgaaattacgcctcccgatttggaaaccagaatcgctattttgcgacgcaaagctgaaacagaaggtttgactatcgatgatggtacgcttaactatattgcatctcaagttgatactaacattagagaacttgaaggggctttagttaaagttcaagcttatgccacaattgaaaaagcagatattgacgttaaccttgcgcgtgaagcattagttgacctcaaattagttcaaaaaaatcgtggattacaaatctctaaaatacaggaggttgtcgcaaactatttccaaacttcaactgctgaattaaagggtaaaaagcgtgtacggcagattgtagttcctcggcaaatagcaatgtatctttctcgtgaattaacagatgccagtttgccaaaaattggtcaagaatttgggggaaaagatcataccactgtcatgcatgcttatgataaaatcgacaagcagatgaaacttgattctgatatcaaaactgctgtctttgacctaaagcaaattttggagcactaaaagttatccactgtggaaaaataaacaagttttacacaagtttttaaccgtaacaagtccgttattttaggcttcttatgagttttcaacagaactcacaggccctactactactaattaattatataattactaataaagagaaatcacacagctattcttgggaggaaaaacatgaagtttacaattaatcgcaatctgtttatcgaaaacctcaataatgtaatgcgggccatctcatcaagagctactattccaattcttagtggaattaagttagacttaacagaagataaacttacgttaacgggtagtgatacagatatttcaattgaaattcaaattccagtcaatgatgatttaaatgtggaatctacaggttctattgttttaccagctagattctttagtgaaatcgtaaaaaaattacctggtaaagacttctcatttgaagtaaaagaaagttttcaaactcagatcatatctgaaaatagtgaatttacaattaatggtttagatgctaataactatccacgtttaccagaaattccagatgctgcttcattcactatttctggtaaaactttccgtgaaatcattaatgaaacgcaatttgctacttccaatgatcaaacacgagcaattttaactggggtacgtttcttctttagtccagataaaattaaagctgtcgcaactgattcccaccgtttatctcaaagaacaattgctttagaaaacggacctcaagctgaaactgatttgattattcctggtaaaagtttgcaggaattagctagaatcattggtgaagctgatccagaagttaaagtttgcccaggtgataaccaagctttatttgtaattggcaacttgtccttctattcacgtcttttggacggaaattatccagacactgatcgcttgattccgactgaaaagaccactagtgttgaatttgacatttccgaattatctagtgcccttgaacgtgccagtttgttaactcatgctggccgtaacaacgtggttactttgactttggatatagaaaatcaatcagctaagttatcaggtaaatctgcggaaattggtaatgttgaagaagatgttagcttcagaaatcttgaaggaaacaatttagagatttccttcaaccctgactatatgcgtgatgcgttaagagcttcagtaacagattctgtaattatgagttttactaagccacttcgtccatttatcattaatccagataaagaagacattgaatttgtgcaattaattacgccagttagaacatattaatcaagtacacaatatttaggtcataaaaagtcgtcaaataaggcgactttttattttgcttttaaacgaaaacgcaaaatattggcgtatatttatttttttaccgtgctagtgtgattaggttattttgaaaaaaagctctgaaaaggcttataagagcgatttagtttgttatttgtgttgaaaactaatataattatataggtataaagcgtattgaaggtgagcattattaagtattttaaagttgacggcgatcatattactttggggcaatttctgaaggaagagagcattatttcatcaggtggacaagctaaatggtacttaaaagataatccagtaactttaaatggtgaacttgaagatcgaagaggcaaaaagatgcatgttggtgatcacgtagtggttaatggccaagaatatgagtttcggtagggaagtcaatgtatcttgatcattttactgtacagaattttcgtaatttaaaaaagcttgacgtaaattttgattcaaacgtcaatatttttattggcaaaaatgctcagggcaagaccaatttgctagaggcaatctattttttagcattaacacgttcacataggaccaataatgataaagatttaattggtttcggcggtgagtttaccaatttacttgggcatgtacataaaagccaagtggatcttgatttacgtgttttgatcacccaaaaaggtaaaaaagtatggattaatcgagttgagcaggcgaagttgtctaaatacgtaggtcagctgaatgcgattttattttcaccggaagacctcgagttgatcaagggtgcaccagcactgcggcggagatttatggatcaagaatttggtcaaataaatgcagagtatttatacttcgcaagtaagtatcggcaagttttaattcaaaagaataattatctgaagcagctagctaaaggtaaggcaaaggatcaggtctttttagatgtactttcagatcaactagctggtatcgccgctgaagttgtctttcgacgatttaaatttcttaagtatcttagtcactatgctagcgatgcttatgcacatattagtttgggcagtgagcagttttcaattgcttatcatccatcagtggctgacatccaagctgatgacagtacagaagaaatttatcaaaagattttagcaagttatgcacgaaataaggcaagtgaaattcgcaaggggacaactacttctgggccgcaccgtgatgatattgaatttaaacttgatggtcaaaatgcacatctttatgcttcgcaagggcagcagcgttcaattgcacttagcgtcaagctggcggaaattcaattggtgcatcaactaacagatgagtatcctttactcttgctggatgatgtaatgagcgagttagatcatggtcgacaaagtgcgctacttaattatattcatgggaaaacgcaaacctttattactacgactgacttagaggggatttcctgggaaataattaaaaagccgcgtgtgtatcacattcaatcaggcaaaattagtttggagaaggagaattaaatggctgataattcaaaagaaaatcttgaaaaggtcaaaaaatatgaaaaagaggctgacaagtataatgccagtcaaattcaggttcttggcggtctagaagctgtacgtaagcggccaggtatgtatatcggttcgactagttctcagggattgcaccacttagtgtgggaaattattgataacagtattgatgaacgacttgctggttttgcgaccaagattgaagttacgattaacgaagatggtagtgtcaccgttcaagatgatggacgtgggattcctgtagatattcaagaaaaaacaggtcgtcctgcattagagactgtatttactgtacttcacgccggtggtaaattcggcggtggtggatataaggtttctggtggtttgcacggagttggggcttcagtagttaacgctctgtccactaaacttgatgttaccgtaatgcgtgatggcaaaaagtactttatcgatttcgatcatggccgtgttaaggatgagatgaaacaaattggcacggttccacttgatgaacatgggacgattgttcacttctatccagatccagatattttcacagaaactattgtttttgatgacaagatcttgaagaacagaatccgtgaattggcctttttgaacaagggattaactttaacctttactgacaagcgtaaagacactgccgaaacagatgtgtataagtttgaaggtgggattaaggaatacgttgcctttttgaacaagggacaagaagtattatttgatgatccaatttatgttgaaagcacctataatggcattgatgttgaagtggctttgcaatatacaaatggctataagactactttgatgacttttgccaataatattcacacctatgaaggtgggatgcacgaggccggttttaagactgcgttaacacgtgtggttaatgactatgcacataagtctaagatcttgaaagataaggacgataatctttccggtgaagacattcgtgaaggaatgacagctattgtctcagttaagcaccctagtccgcaatttgaaggtcagactaagaccaagttaggtaattcggatgctagaactgctgtagataaggctttttcagaaacctttagtcgtttcttgatggaaaatccttcagttgggcgcaagattgtagaaaagggtcaattagccgaacgagctagaactgctgccaagcgtgcacgtgaagtaacaagaaagaaatctggtctggaaattgctaatttaccaggtaagttagccgacaatacaagtaacgatccaagtatttcagaactgtttatcgtcgagggtaactcagccggcggttctgctaagcaaggtagatcacgtttaacacaggctattttgccaatcagaggtaagattttaaatgttgaaaaagcttcgatggatcgaatcttggctaaccaagaaattagatctttattcacagctttaggaacaggctttggtgctgactttgacgtttcaaaagcacgttatcacaaattgattatcatgactgatgccgatgtcgatggtgcccacattagaaccctgctgttgaccttgttctataactatatgcgcccaatgatcgacaagggctatgtttatatcgccaagccacctctataccaagttcgtcaggggaaagtggtcagatatcttgatactgacgaagaattgcatgattacttaggtagcttgcaaccaagtcccaagcctactgtgcaacgttacaaggggttaggtgaaatggacccagagcagttgtgggaaactactatgaatccagaaaatagaagactggatcgggtaagtcctgagtatgctaaagatgctgacgcagtctttgagctcttaatgggaaatgaagtttcaccaagacgtgactttattcaaaagaatgctaaatatgttgaaaacttggatgcataggaggattagatggacgagaatcaaactcaagatcatagaattaaaaacgtcgatctaactagcatgatgcgtagttcatttttggattacgcaatgtcagttattgttgcacgtgctttacctgatgttcgtgatggcttaaagcccgtacaacgtcgtattctttacggtatgagcgagttgggtgtaacgcctgataaaccatacaagaagagtgccagaattgttggggaagttatgggtaagtttcacccccatggtgattcctcaatctatcttgctatggcacacatggcacaagatttctcataccgttacatgttagtcgatggtcacggtaacttcggttctgtcgatggtgatgagccagccgcaatgcgttataccgaagcaagaatgagtaaaattgctgtggaaatgttgcgcgatatcaacaaaaacaccattgattggcaaagaaactatgatgataccgaaaatgaaccggttgtcttacctgctagaattcctaacttgcttgttaacggtgctaacgggattgccgttgggatgacaacaaatatcccgccacataacttgactgaagttattagtggtttgcacatgttaatgaaaaatcctgatgctacaaccaaggacttgatgaaagttatcccaggtcccgattttccaactggcggaattattatgggacgtggtggtatctaccgtgcttatgagagtggtaagggtaacattgttgttcgcgccaaaaccaatattgagactgaaaagagcggccgcgagcgcataattgtgagcgaaattccatttatggtaaacaaggctgaattggtgaagaaaattgctgatttggctcgagaaaagactatcgatggaattactggtgtgcgtgatgaatcagaccagacagggatgcggattaccattgatattcgccgtgatgctagtgctagcgttgttttgaataatttattcaagcaaactcaaatgcaggctaactttggtatgaatatggtggctattgttgatggtgcgccacactttttaaccttgaagcaaatgctgcaatattacttggatcaccaagaagatgttgtaactcgcagaacaagattcgagttagctaaggcagaggcaagagcccacatccttgaagggttaagaatcgctctggacaatattgatgaaattgtccacattatccgcaatagtcaatcaagtgacattgctaaagcaactttgattagccgctttggccttgatgataagcaatctcaggctatcttagacatgcgtttggttcgcttgactggcttggagcgcgataaggtagaagctgaatacaaggaattacaagctaaaattgctgactacaaagatattttgtctaagcctgagagaattgaccaaattatctatgacgaattgcttgatattcaaaaacgattcggtgataagcgaagaaccgaaattggtgctagcgaagtcgtttcaattgaagatgaagatttgattgaaaagcaaaatattctgttgacggttacccataacggctatattaagagaatgccaattcaggaatttaagactcaaaaccgtggtggtaaaggtatcaagggaatgggtgtacaagatggcgactttattgagcatttgatttactcaagtacgcacgatctgctcttgttctttactaatgctggtaaggtttactccaagaaagcctatgagattcctgaatacggccgcgcagctaaaggattgccagtagtcaacttattgcaattggaaaagggcgaaaaggtccaaactgtaattaatattccggaaggtgctgacgataattacttattctttgttactaagatgggaactgtaaagcgtacacacgttagcgaattttctaatattagaaacagtggtttaattgccttaactttgaaagatggcgatgaattaagcaatgttttgactactgatggtaagcaaaacatcttaatcgggactcacttgggctacgctgttaccttcaatgaaggcgatgttcgggcaatgggtcgaactgctgctggtgttcgcggaattaacttgcgtgagcatgactatgttgttggttcaggtattttaggtgctgatgaccaagtcttggtaatttctgaaaagggttatggtaaacggactccagcttcagaatatccagttaaaggccgtggcggtaaaggtattaagactgccaatattactgagaagaatggtccattagctggtgtaacaatcattaactcaaataatgatgtgatggtaattactactgacggaattatgattcggtttagaattgatgatgtttcgcaaactggccgtagcaccatgggtgttcgcttgattaaagttagcgatgatagtcaggttgcaagtttaaccgttgttccaactgaggaagaacaagatcaaactggtgacgatgacgactcaaaaaatggataattaattaaaaaaacaaaaaatttgaacttttaaaaaaattatcaaacttttttgcgtaataaataatgagcagtaaaaaatctgctaggatcacgtgaaaacagtttggtaattttttatttatatgctaaaattagaaattgcgagtaatattccattactccttgttcttgattttagcaagaaccatatagtccagaaggaggtgcaatagtcatggcaactacaaagtacgaagtaacttacatcatcaagccagatgttgacgaagacaacaagaaggctcttgtagaaaactacgataaggttatcgctgataacggtggtactatggtagaatccaaagactggggccagcgtcgtttcgcatatgaaattgataagtatcgtgaaggtacttaccacattatgactttcactgctgacaacgctgacgcagttaacgaatttagccgtttgtcaaagattgacaacgctatcttacgttcaatgaccgttaagttagataagtaattttaatttattatccgttatgtgatttaggaaaggaaggtacatgagtatgattaatagagttgtacttgttggccgtttaacacgtgatcctgaattacgtactactgggagtggaatctcggttgctacgtttactcttgctgttgaccgtcaatttacaaatagccaaggtgagagaggcgcagatttcgtcagctgtgtaatttggagaaagtcagcagaaaacttctgcaactttacttcaaagggttcattagttggaattgatggccgaattcaaaccagaagttatgataataaagatgggcaaagggtatatgtaaccgaagttgttgttgataacttcgcattgctcgaatcacgcaaggatcgtgaagcccgcggtcaaaatggtggttatacaccaaatagtggaaatgctagcagtcaacctgctaacaatttcccaaataatggcggatcacaaggtaattcacagactaataacaatcaaaataattcacaagatccatttagtggctcaggtgatacgattgatatttctgatgacgatctaccattttaaactaaattaaagaaaggattctagaacatggctcaacaaagaagaggcggccgtcgtcgtcgtaaggttgactacatcgcagctaaccacatcgactacgttgactacaaagatgtcgatctgttgaaacgttttatctcagaaagaggtaagattttaccacgtcgtgttactggcactagtgctaagaaccaacgtaaagtagctaatgcaattaagagagctcgtatcatgggcttgttaccattcgttgctgaagactaatttagatcgaaataaaccaaaaggacaggacacaaggttctgtccttttttcgtataataattaaaaaaattctctcttcgtattgtacctactgttttcaatcatgagccggaataaggtataattaacactgatatactatatctattaggaaggatcttcatgaaggattttttacgtaagctagaattgcctgaatttattaaggattcacggctgacagcttctataatcattgcactttctctttcattattgggaagcattattgcgatgattatgaatccattgtttggtttggcaatgcttttagtctttattttgaccgttgcctttgccatctatgggacctatattttagcgggtaatgcgaatagctttgcggttaatttgtcttaccggataaagcgtagtgaacaagaagcaatgattaagatgccgttgggaattttgctttatgattcggatcaccaaattcagtgggttaatccatatctgcaattatatttaaagagtacagatttagtggggcacacaattgaatcagttgaccctgatctgaataagctacttaatgaagcaattgaggcaaaaacagcagaaaatcatctggttgattgggatggtcaccgatttgaaatggtggtccaaaataatttaggcgtaatatatttattggatattacgcgctatgccaaaattgaagataaatataaagctgaacgattggcgattggtcaaattttcatcgataattatgatgagctaagtgaagcaatgcatgatcaagaattgaccagcatgagttcatatgtgcaaaatacattgagtgattatgcgaaaaagtttaacgcatatttaaaacggattgatgaagaccatttcttgatcttgatccatatgcaagaattagctgagatggagaaggacaaattctctgttttagataaggtgcgtcaagaaacgagtagaaacaatacgccacttactttatctatgggaattgcttttgggagtgattctttgtctgaaattgccaaccaggctcaatctaacttggatttggccctaggtcgaggtggagaccaggttgtcttacgtcaacccggtaaagacgcccgcttttatggcggtaagtctaatccgatggaaaagcggactagagttagagcaagaatggtttcacaagcaattagtgaactatttaaagatgccgatcaagtttttgttgttggtcatcagcgtcctgacatggactcagtcggtagtgggattggcgtagtaaaattagctcgtcttcacggagttaaagctaattttgttttagatactaataagacaaactatgatgttggtcgcttggtcaccttaatgcaacagaaaaatcaggataaggatatttttattaaccctgatgtagctttagctcaagttactgacaagtcaatgttggtaatggttgatcattcgaagtattcaattacttactcacggtcactttatgatcgtttgaagaatcgaatcatcgttattgatcaccatagacgaggcgaggaattccctgaaaatccaatgttaacctatgttgaaccatatgcttcttcggcttgtgaattggtcactgaaatgattgaatatcagcagccagctaacggtaagcgagttttgaccgatattgaagctacagcaatgttagccgggattgtggtcgactccaaggaattctcgttgagaacaggaactagaaccttcgatgcggctagttacttacgttcaatcggtgctgactcagcagttgtaagcatgctcttgaaagaggacattgatagtttcctcgaacggacgcatttagtagccactttgaagatggtgaagccacatatggccgtattatgtggacctgatgataagattatagatccgatcattacagcgcaggcggctgatactgcacttgatttggaaaatgtgggtgctagtttcgcaattacgcggcgcagtgataatacgattggtatttcagctagatcaatgggtaagatcaacgttcaaattattatggaaaaattgggcggtggtggacatctttctaatgcggcaacacagattaaagatgttactattgaagaagcaaaacaaaaattgcttgatgcaattgatgaatatgaaaaagaaaatgattaggaaggacaaatatgaaagttatttttactcaagatgttagaggtcgaggtaagcgtggacaagttaaggacgtacctgatggatacgcacaaaattacttgattaagcgaggcttggctaaagaagctactaaaggtaacatgaataccttgaagcgtgtagaagctaatgaaaaggctgcttatgaagcagaaaaggccgaagcagaaaagatcaaggcagaacttgaaaaagacgataccgttgttaacttcaaatctaaggctggtactgactcacgtttgtttggttcaatctcaagtaagaagattgtggaaggccttgaaaagcaatacggtatcaaggttgataaacgcaagcttaacttgccagaaccaattaagactttgggctatactaatgttcatgccaaattatttaagggtgtagaagctactattcgcgttcacgttactgaacaagactaataaaaagtggttgtgattgatggataatatcgtttctcaacaaattccgcatgatcgcgatgccgaaagggcagttctgggtgcgatttttatcgatcctgaagcaattgcggatgctagtgcggtagttcagcctgaagatttctatgagcgggctaatcaaattgtctttcaagcgatgttggacttgtctgatcgcggggatgcaattgatacgctgaccttgcaggatgaattaaacaaaagaaatcagttagaagatattggtggtatcggttatgtttctgaattagcgatggccacaccgacagcagcgcatgttacctattatgccaaaattgtgcataggaaggcgctgcttcgtcgtttaatctctgctagtcagaagattatctctaatgcaatcgatggctctgacgatgtaacagacattctagatgacgctgaaagtgaaatcatgaatgtctcgtcagagaatagcacaggcggctttaggaccattaaagagatcgttaattcagcgattaatgatattaataatattccggatgacggaaatatggttactggcttgccgactggttttgcggaattagataagatgacaactggttttcacgatgatgaattgatcattgtagctgctcgtcctggtgtgggtaagacttcatttgccttaaatattgcgcaaaatgtagggctacacactgaaaaaagtgtagctatgttctcactagaaatgagtggagagcaactggttcagaggatgttagcttctgaaggactgattaattcacagcacttgagaactggccagcttgatgaagaagaatggcgtaaattggtagtggcttctgggtcactagcaggtgcgcaaatctttatcgatgatacgcccggaatcaagatgagtgaaattcgtgctaaatcacggcgattagctaaggaaaagggcaatcttggtcttattgtaattgactacttgcagctgattgaagggccacgcagtgaatcacggcaacaagaagtttctgctatttcaagacagttaaaaaagctagctaaagagttgcacgtgcctgttattgccctttcgcagttatcacggtcagttgaacaaagacaagataaacggcctgtattatctgatattcgtgaatctgggtcaattgaacaggatgccgatattgtttctttcttgtatcgtgacgattattatcgtgatgaaccagatgatggtgaaagtagcggtagtcaagatgaagttggcgcagaagacgataatggtgaagtagaagtcatcattgaaaagaaccgttccggtagccgggggacggttaagctaatgttttcaaagccattcaaccgtttttcaaatttggattatgcgcatgatcctaatggtaattagaaaaagcactcgatgagtgctttttctatgtttgaatataatacgaataatatttacatttataatggaaattgtttatatttggtgttgaaatgataccataagtttgctataactattactgaaaagagtaataacgaatatactcatggaggaatagcaaatttatgaaatttaagaagattttggttggtgcttgcgccgtcttggcagctgtctcattagctgcttgctcaaatggtaagaagagttcatcttcatccagtgaacctaaggaattaaacgttgagtttgtgccaagtactcaagccaacaagatggaggctaaggctaagcctttaggtacgcttttacaaaagcaattgcatatcccagttcatgtgaccgtttctaccgactatagcggtctagttgaagcaatgtcatctaagaaagtagacgtcggcttcatgccaccatattcttacatattagctcataaaaagggaattgctgatgttttattgcaagccgaacgttacggctatgatgaaccatccggtaagatgaatcataccttaatgcataagtatcgtggtatgatcgtggttaagaagggctcaaagatcaaatcttggaaagacttaaagggtaaaaagattgcgattggcgatcctagttcttcatcgggctatgtttatccagttgcggaactttacaaaaagggtttgaatgtaaccaaggactgcaaattagttaatgttaagggtgacgatcaagaagtgttatccgttttgaatggggatgttgatgccgcattcgtcttctcagatgcacgtaatattgccgctaaggatgacaagaaagcaatgaccgatgttgtgccaatctactttaccaagtggattccaaacgatactattgcggttagaaaagatatgcctaaaaaattcagagttaagttagctaaggctttcaagaatattgctaagtctaagaagggtaagcaaattatcgaaagcatttataaccattatggttatgttgaagctaaggattccgactttgatggcttacgtcaataccaaaagatcgttaacaaagctactggtggcagtaactaaaatagaataatttaattgaaagggctcaccattacgggtgagttctttttgtttctatataatatatcagttaaaatagacataaaagaaatgaagaaagaagaaaaatatgaaaattgcggttttaactgatagctcagcttatttaactaaagaacaacaagaaaaatatcaaatcgatgttttgccaattccaattatttggggcaaaaaagtatatcatgacttagtcgatattggttatgaagaattttatcaaaaactaaatacagcaaaagagctgccaactacttcgcagccttcaatcggtgatcttaagcagaagattgatgaatacgtggcagcaggctacacggatgttattgtaattactctttcaagtgggatttctagctatttctcaaccgttcagagtgttgcggcagaagaagaccgaatcaaggttcatccattcgatagtaaaattacctgtgctggtgaggcggattatgctatgttggcaggccgtttaatcgaggctggagcggatattgatttgatcatgcatgatcttaaggacctgcaaaaaacgatggatgtgcgcttcatggtggacgatttgagccatttaaagcggactggacgtttatctaatgcggctagctttgttggtacgttgtttaagattaagccgattttatcgatggatgtgcaaaatgaaggccatatttcagcgattgcgaaagagcgtcaatataaacgtgcatacaagcatgtgcaaaatgattttgataatttgactaaaaatatgccgtataagattcaggacacaatttttgattcacttgatcctgagaaaaagcaagagtggctggaagattaccaagcaaagtttcctaagtataagttcgataccagcattatcggaccagttgttggcgtgcacgtgggacaaggaacaatgtcgatgatctggtgccgtgatttggatacttattttgatgaaaatggtcagccaatcaagggaattgagtcacaagcagtagtggatccagagtaagcataataccgatatggcaaaaaaatgagaggcactattgattttttaatatcattgctatattattattaataatttaatatggcgatgaatagggatgatcagagtgtcaatcagttctttttttaaaaagttaatagccaaaaataaactcttgtttttagctatggtgattactagtgcttttgcttctttagatggcgtcatttctccttatgttattgggaaaattactaatacactttctcagaaacattttagtgagataccgaaaatcttgttactgtatctgttgatgatgctttttctgaatgttagcttttatctatggcaattttgttggggaaaaattaccaaatcaagtaatgaattattgagatctacagcttttaataattttattgcttcccctagtgaaaagaaaatcactaataccctgaattttatcaatgttaatgttaaacaaattgaaaatcaatgtattgattcaacaattatgcttgtttactgcgttgagcaagccatcgtttcattagtttatattttaagtattaatggcattgcagcaatggttttcttagtttgtgggttaattccatcagttattccacgtttaactcgtaattgggttcagacaggaactaaaaagtggaatagcagttatgaaaactataatcaaaaaacaagtgatgctgtgcatggtttcgatactatcagacatgcaaatggtgataatagattcaaaatatttgtccaaaaagcattaatgggagaagaaaagaagtattttttgatgaattttcggcgtaatacttctaattttttagcccaggtctcttattcattatcaatggttatttctttggctgttggtacattctttgtaattaatggtcaaattctagtaggtggtttgatttctctatttttagcatcagatcgtttaactagtccaattatttcgattgttaatattgcaaatcaattgacctctgttagtcctctgctaaaaaataaagctttacaaaaatctaaaaagcaagaatttaataatttagacttcaccaaattaccaaaccaagagaaaataatttttgatcactgcaatttagggtattctaataaagctattttgaagaatattaatttgacagtttctaaaggcaataaagtattgatcatcggtcgttctggtattggtaaatccactctgttcaagacattgcttaatgaaattccattgctaaagggcaaaatactggtggatgatagtcttaaccaagctaatttctataccaattttggtattgttagtcaggatacttatatattcgctgaatctttgcgctttaatttaacgcttggaaaagattttcctactcagcaagtaataaatgttttgaaaactgttaaattaagttatttagctaatgaaaaaagcttagacatgcagatcggggagaagggattatcactttcgggtggagaaaaacgaaaactggaaattgcacgagctttattgaatcaaaaatcgattttacttgttgacgaaggactatctggacttgatgaagaaagcaataaacaaatttttgcacttcttcaaagtcttccgcagacagtaattgaaattgaacatgctgttagtccagaagagaaaaatcaatttaatcaaattattgatctaggagctcagtattgatttttttataaataaacaaaaacaattacatacgtatgaaagcctttacacataaagacttttttatttataatattagcagcacgaaaactttttggagaaaaacttacatacagaaaaggatgagaatatggcagaaaagaaatatgtcggcagtatcgaagcaggcggtactaaatttatcgtagctgtgcaagatgttgaaacaggtaaggaagtagcgcgtgatcgtattcctaccactactaacaaggagactttacaaaagactgctgagtttttcaaaaagcaccccgttgatgcattaggaattggtacttttggtccaattgatatcaatcctaactctcggacttatggttacattttggacacgcctaagccaggttggtcaggtacggacgtaaagggcttttttgaaaaggaattaggtattccggttgccatgacaactgatgttaatgcatcatgttatggtgaatatgttgctcgcggccgcaatgattctaagagttacttctacgcaacggttggtactggcgttggcgctggaattgtacaagcaggtaagttgctcggccttaataatcacccagaaatgggccacatgttggttcgtcgttatcctggtgatgattatgagggtcactgtccattccataatgatgcttgtgtcgaaggcatgtctgctggtccaagtcttgagggcagaactggtatccctggtgaaaaattgtctcgcgataacaaggtcttcacttattctgcgtattacattgctcaaatgctcttcaatgtttacatggctgctcgtccagatgtaatgattgttggcggttcagttttaaatgaagatgatttggttaaggtaagaaagttctttgatgaatttaacaacaattacgttgccacacccgatttgaatgaattaattgtgcgtcctgctgtggctcacaacgggtctgcaactcttggcgattttgaattagctaagaatttgctcaaataaaaaagcatagataaattgaataagcaataaaaaggctcaactcgttaagaaagacgtaaggcgagccttttttgacgtaatttgacctaaatgcgcgtaatattaattctagaaacgtaaccggtttattaagaaaggagcccaactatgaacaaatcagatagtggcttaaaagacaaagttatcggtaaagtgaaagaagtcgaaggtaaaattaccggcgataaatcacgcgaagtccaaggaaaagctcaacaagccaagggcaaagttaaggacaaagccaaaaaattaaaagatgatctggaaaaagaccatcaaatagatgaagattgttaaagactcaggtcgactagcaatagctaaacagaaagcaaataggtgatcctatgttatcatggatctgggttttaatcgttggcgctataataggtctaatagctggtttcataaccggcaagggtggatcaatgggatttctagctaatttaatagcagggctggttggttcaaccttaggccaagcaatctttggttcgtgggggccgcaaatggctgggatggcaatcgtaccatcaatattgggagccgtcatcttggtactagtggtttcctttgtactagggatgcttagaaaaactgaataaaaatagaataagagaaaaaagacatgctgggcatgtctttttttgtgtttcatgtgaaactattttagcttttttcgttcattttctttctcagctaaaaaacgttgcttaatttcttcaggcaaaagactagggaccgtcttgtcataaaattcaaagaatatgggtgccttgttagagtcattgctcttgggatataaggcaaagtcactttcgctaaacggtaagctgatattaccacgtaaagcattgataatctcaccgaacatatgcaaaacataacggcgcgtctcaggctctaatgacatgattacgcgactgaaacggacagtgcctaataatttatgggcagtaatttgaaaaatatcggtaatatttaattcatcaaatgcttggaaaagagcatcccataatgcaccacgttgcttttcagggatgctgtggttaaagtcgatgaagaaatgccgcaaagaacgtgcacctgaagtaagtccttctgctagaacaaaactatcacggccaacagaccaacggcgtggatcatgttgctggaccatcggtgcagtgcttttgacgattaaaacgtgttcaggatgatcaagcatggtgccaatgattgaagcttctgggaggtaggtcttcatcttgggtaatgcacgtacaaagccaggtgctttccagacttggtggaaaaagccggggccgtcaaagctaaaggccttgataatgcggtcttgcaattttggctcggctacgcttaaagcatattcagcgtaattgccgcccttagaatgccctgctaaataaattttgtcatggggaaaggcggcagccatttctttgagataattggcagcaacatcttgaccataaactttgggcatgtagttcatattcatgtcttcgttccagccgatgattgagttgtcggttccgcggtaaacgatgataattgtattatcgtttaggcgaaaagtagccgcggtaaattgaagtggataaggatccttttccagccgattagtccaattaaggattttgatgtcgcctagacgaggtgatttaggtaaaagaagaatttgatcgccagctaaatctttcatttgaacttgaaatgaaggaaggacgtgtaatttttctgcgacttcacttaaggtatgttccttagcagatttgtcgacgggtaagtagatgattgaggcgaagagggatgcgtccacgctattaaaaggccgttctttaaaagaaagatctccccgccaacgtaaataatcaagtgttccagccataatctcatcctttcattaattaggcaatattactattttactaaattgtcgcgccaaaataaaaatctcaagctaatgcttgagatttaaaatgattttacataccaccacgggtatagctaatgcgagtaatatcaggatatttacgtagattcatgacaatagagttctcatcaatcttattattaatgattccgtcaacgtataaaacaatacggttatcactcacgtcgagaattttaacagtaacattttcgacgtgattatctgctagttcttgcctgattttagacaaaatgtggtgctggttaatagccacaatttgaatgttaaaacgaacatgtggcgttattttgttgataatgacatcatcgtgaaagatcatttgaatgataaacaatagggcggttgataggataccgatgaaatacatgccagcaccaacagccatcccgatggcggcagttgcccaaactccagcggcagtagttaagcctgagacctgttcttttctaactaggattgtacccgcaccaatgaaggaaattcctgtaacgatctgagccgcaattcttgatggatctagtgcaatgtcatgcatgcttaatagatcggtaaatccatatttagatacgatcatgaataaagcagaagcaatcgcaactacgatatgagttctcacacccgcgctttttctctgaatcgcccgctcatagccgattaatgcgccacaaaaagctgcgacaacaattctaagtagccaatctaattcggttgtaattggagctaaagtttgcattatttagtcctcatcctttgtataatcaacaattattatcatttctattttaacgtaaatgcagaaaaattatagtctggggaatttttttgaacttttttcaaaaaaagacttgcacagtttccatctatatggtttaataaatactgttgtcgggtaagacaacgaagagttgctgacttagctcagttggcagagcacctcactagtaatgaggaggtcggaggttcgaaccctctagtcagcattagttaaacaacttacaagtttttaagtctatcatttaagttcgaaagagcttgatatgatagacttttttgttacttataattatttgtgtagatttaaaaatagatatgaatacttagtttcaccacaaaaaatgccacacagtttttctagtgtggcatttgtgtggcaaaggtactataaatactgtaatgacaggctttattgtttgtcattttttgatttatctgaattatcagatgaaaagaaattttctttagcaaattgtagactctgtataccttgatcaatagctgataaaagttcttttttagtagcttgagtattgattacttttgaagcagttagttcaatgttatgagccatattatcaacttcatcaattaatatattaaagtttctattatctacatctttagaatattgatcttttaatttattaagaactaaattttcaaattctttatttgttgttccaactagggaattgataaagttaagatctttaaatagaaaggagaaatcttttttccaaaattcattgatttcatcaaattgaggaaaatgtgttttttctgctgtcttatcaatatcgccgtctttattacgataaaaattcagaggagtattatagtcacccaaaaatagtaggtagttttttaagtattgatgaaattcatcagtaaagtcagaaacgttaaagtatttattatgtaaaagagatactaatttatgatcaacgtctgatctttgggtgccttttcctgataaatagtattcagaaacattaagcgcatgtgcaagtttactcattgtttggggagatggatagttaacaccactttcatattttgcaattgtgcctctggagatgtttaatcctttttcatttgatagataatcggagagttgggcttgagttttatccattttttctctgatttctttaattctaggtaataccataaaaatcctcccttaaatattcttcataattataacatgctctataaactaaggagctaaaaatatttatttagctattgaaaaggagcaaacaaaatgatataactatttatgtagaaaggagcataaatataaatagttcatcgttataaggagcaaataatgtatatgctctaaagtgtagaacataaggaggttccacatggcacaagataatacaacaaaacaaggtgaattgctttccacctttaatgagagcaacagtaagagaactccgattcaatcggctttaactcgaccattagaggaagctatcggtaaatgcttcttgttactaagcggaacaacagaagaagtccaagattctaatgatgaaagtaaaactattccgcgtgcagtatataaagtacgagttgtaagttctaatacaagactagcaattggtactgtgttaaccgtgaaagttaagggaagcaaaagtgtaattactgatgatgaaaataaaaaatttttgtttggtttagagaaaaataaggtagttgcctttgatgatcttagtcattggaattttaacggaaatgaggggctatctgcgtcaaatattagaattttggaagtcagtcctcaagaagctatgaacttataagggctaggaagtgattttgtgaaaactaagagactagtattagatacaaaaaagccgctaggtaatcctagcgggctaaaaatggcagaaggagtaaccttattgttatcaattgcagttgagtataaggttgcgcctaacttgttaagcacgggcaattacacagctcttgcttatccatttttagtaaatattatacccttagggtatccatgttggaagtggattaatcttcatattattaactataaaatctataagcgattaatgagcatcattcattctgaacaacttatagattatgcagataaaaaagaaacaacaacttttaatgaacgaaaagttgaatatggcgtcaagattatctatgaagaaacatcagaaggtatatacattactgtatatcctaatggcataaagcatagtgatgctacacaaacgctaaatagcaggctagaggagaccttcaacatgaatgtcttatcagtagatcaccaattatcttatacaagatacttgttaagagatattgataagcaacaaatgaaggttatggatgatgtgttttagttttaatattcaactagataaaaatactagttttagtcttaagggctcaggaggtcttctgatagtcggtcgtagtgggtcaggcaaaactaacactacgacttatattatgcttaaggctgtctctcaatgtgattgcggattatacattattgatgctaaaagagctgatatgtatggacttcatcaatttttaaaagatggcaagaaagtagtagcaagtacaacaaatcaaatagcacggctattgcgtgtcattaacgagaatatgagtgcaagatatgagcacttcaaaaatggaaaatggggacaagatttctcagaatatgggtatcgaccttatctattagtcattgatgaagtatcagctatgcttgctgaagctggtaagaataaaaaagagataatgggtgaattacgtcagattattctgcgaggtcgacaggctggaatctttacacttatctctggtcaaagaattgatgcaaccattttagatcgtgatattacattgcaattaggcacacgaatcgttatgggacaagcagactcggaaacttatcgtatggcttatccaatggtgaatgatattaaagcattaccattagttccaaataaaccgggttatggtcttatctattctgatggacaaaagattagcaatcctactccgtttgtgtcacctgatatgtctaatattgatgtacctaaggtaattacccgactggaaaataattatgactcgtctaagtataatgatgagtctgattattggcaattatagttattttagttgccagctgacgggggacggagtcacccgaatggaatgttcaagcgtgagcgggctggcaacacccacttaataatatgggtgtaacggaaagattattaatcatggaaacgatgaataatattaaaattgatcaacttcgtctaaatattccatatgatgaaatctatcaagtagaaaatagtcaaagtttacccaaagaagttatagtagctgataatctgctgcatctggcatggttgtttaagtctaatacagtgagtcatggacataatggctatacttcttcatataatttcggttcaggagaacaaggcggaaatatttccgtaatgtggaacgagtcaagaaaagatatgggaatactagtcgactttactgcgacaggcaaagcgctatatgaaagccttgctgaattacatggaattcctgttaattggaagaaaataattgaagaattatatgaaaaaatggggcatatatcgaggctagatatagctactgaccttattaattatggtttttcagttaacgaaattattcaaaggttaaagaatgaagaatcatttttcttgaatactcaaggaaataaaatcaatgctaatcgatttaagataattggaagctatagtgaagctcagactctatatatcggtagtagaaaaagtgatgcttttctgagaatttatgataaaaaagttgaacaggatcgagccgatggactctatagaaacttggctagaaactgtaacgattggataagagtagaagcagaatttaaacaccgtttagctaaagaactaggaaaatatattacaacattaactgcagataatatttatccttatttacttggctgtgtactagaacgttggtcattagttgatagggaagaataatgacatatgaaaaattccaatattctaaagaatggaagattttaaaagagttatcgaaaggacaaggacttcaagaactaaaacaagctcaagttgacgcttccctgaatagaaaaattaattggttcttgtatggtggtgccagtggagttattacgttgattaaagaaatttatggtgatgaagcactaaaaaagttttatcaatttttagattattttatttctaatcctgatacgttaggacattactaccactcggacaagataaaggcggatactaaaactattgcagattctacgcaaggcttgaactttggagaatatttagaagacttaaagagagaattagttgagggagataaacagaaaggcaggggctaatatgtttggcacagagttactcaacgctagacaaatagcagaagaattaggtattagctatacttacttttttaaattaattaaaaatgggtgtccttatcatcaacttggagaccaaggacgtaaatattacgttttaaaggaagtacaagagtggctattagtaagtagccaacattaattagaagacgtagcaacttgctacgcttttttaggagaaagctatgtcaattacacaaattaaaacggggaaaaataaaggaaaataccgtgttagaattcaacctactgataatgaaacaggtaaaactattccgattcctagtaaagtaacaaaaactagcagtaagcgtgaagcaaaacaattagaagaacaaatgtgggtgcaatatcgcgcgcataaagaaatgaatttaaatgtattagatcaaccacttgcaaaagctttagatcactatgtagaagaagaaagaagttcggggcgttggtcatcgattactacgtatgataattggaaatatacggttaagcttgtttctcaatatttcggaaagaaaaaagttaaagatatcaaagaaaaagatatgcgtagttttgctagaaattacataagtacacataaagcaactgtggcacctcattcaacgctagatagacagttacaaaatttaaggagttattttgctactttgaaggaatatggtgtcttaaagaatcctattcctatgaagccattaactaagttttttagacgtgatgaaatgaatgcccctgttaagaaatatgttttcactaataatgaaattaatgttcttaaagatagaatttatagagagcttggagtaacaagaataagttattggacaactagaattgctatcttgatagctctagatactggaatgagacctcaagaaattcaggctttaaagtggagtcaaattactaatgatggaagttttaaagtttttagaataaatgactcatggaatgaaaaagagaagcatcttaacggacatttgaaaagtcgaccgcatggagaatctagactaacccttcccctttctgaaccacttttgcagttattgaataagtttcgtcattgtcagttagaacttttaaaggagaatggtttaactaattttaatgatcgaattttattgaacatcacagattatcacttgtgcgcattagggtatccaataactcaaaaaagtatgaatgatatgttgaaacagttgagtaagaaagtaggggttaataatcaaaatttaaatataagtatgtatacttgtcgtcatactgtagcaacaaaattagggaatacaccaggcatgtcttacccttgggcggcaagcagattagggcattctttaaagatgtttatgcggacatatgtacatgttgatgaagatcgaaatgaagaaatgcttagattgatagctaaaagataaaagaaaaatgcaaaaataacttatatttgataaaaaaatgaattaatgtagcaatagcaagaatttgaaaataataaataacaaataatttttaacattttatagattttgaaaaaaaaagagcgtatactcagggcatcataaagagatgtgaaggagaaatcaaaatggttattgtagaacaaaagtttaataaatataatcatacaagcaacatggatgctatggagtacgctgcaggatgttgcacatgtacaacaacaagttgtacaacttcatgtgccgctgtagctgaaagttaatggatagttggcgctgtaaattatattacagtgctttttttaggagtataaatactgttatgtgtctattaagaataaaagacttaaaagttaattttaaggatcaaacagtactggattttagaggtcatgatatagagataaagtcaggagacaaagtagctctaattggaaaaaatggggcaggaaaaagtacactattaaattgtcttttacatgaagtaaaatacactggctgtataaaggagaagtatcatcagtcggatataggagtagtttttcaagaaaatgtatattttaaattcttgaaagtttatgaaatctttgaattagtgtggaataaacctaaaaagttaattttaaaatctaaatttattaagaattttaatttagcaagcattatgaataaatacatttctgacttatctggtggtgaaaaacagagattaacaatagctttggttttttctcaaaataaaaagatttacttactagatgaaataaattccggcttagattatgataacaggcatgaattaagtaaaatcataaataatattactgaagaaaaaacagtaatacaaataagtcattattttgaagaagttgaaaattgggctaataaattgataatccttgatagaggcaagatgatatattttggaagcttatctaagttttattctataaataagcatgattcattaattattataaatgataaaaaaagcctatctagactgacccagaagcctttaaatctttatagtaataaatatattgtatctagtagtattgatgagagacatgatataacaaatttattagagcaacaaaagatagattataaagtggtgccacaaaatttatacacaacttataaattagcattagtaaaacatgaggataggtaaaataatggctagagaaattttattaagtttaaaagcacaacttagagttccaattgctgtatttttttctattttttttccaattattatgatgattatgatgatgacatcttacggtaatttttcattaagaaatggatatcactttatagataagtatttttttattagtactactataggtattctacctctaaccttaattagttttcctattgatataaataatttgcttgaaactaagcattacttgcgtttgaaatacttaaatgttgatttaaaaaaattatttttatcaaatattatttcttatttgataattgtatttatttcagttggaataaatttaatagtaggaaaaagtatatataatttaagattacctagtatagagtatttatgttatttttttattcaattattctattgtgcgatagttctacttatatttggcttactgttaagtttaatagtatcagatatcaaagctttaatgcctgtaggaatgactataatgtttatattatttatggttataggtgtttttgtacagtatagctccttaccgaaaattatacgtactatttctagctacataccagtaaaatatttggcaaatgatttctattatatctggattggtcaggctaaatggaatatgccattttttaaatgtaatacgatctggcttatttttctgtgtttgatttgttacataatttatagaaggaagaataatgttacgaagattttcaactagtaaggatttaagaattgggatagagataatagttggaatcactttatcatttatcattaattttataatgatttcaattgggtatgccattacaaatagtgaaaaattaaaagaatattcggtcaattattttggattagtcatatataaaataaagaattatggaaataaaggtataccagtttccaataatatgatgtttatcggaatagttttaacaataatatttgtttttattgtagagtgggttgtatataagagggataagaatggtagagtatgagcttaaaggattatttaatcaaaatacgctttcaacatcagatattagtaataataataattacaataatcaacaattatttgatcatattataagaggaaatgctaattctgagatgctgacatacttacttaatatgaaccatcagcgattgaatgattttaagagtatgcatcaatataattatggaaattttgcatccttaatgaacagtgtagaacagtataacgaaatagaaaatgatgaaactattttgctacctaagccattgagaataaaaaataagttacagcaggttctaaagaaaagaaaaagtgttagaaattatataggcttatcatgtgatttacgagaattgtccacaatattgatgtattcatttggaatctcgggaagaaaagagaattttggtggaatagtcgcaagtatgcgatattacgcttctggaggtgctctatatccaatttcagtgattatatatataaataaggtggatggattgaaaaaggggctgtatttatatcagccaatgtatcattccttattaccactaaatattaaaactcaaatcgatattaataaattatttgtaggaagtaacattgatgttaaaaatagtagcttttttgtattttataaatatgcgattagttctacatatttaaaatatggtgagctatctttagctaatattttgattgaagcgggaatgatggcgcaaaatttttccttagtaactacagcatgtggttttgggtcatgtccaattgcaggatataacaaaagatttattgaagatatttgtaatttagatcatgttaatgagcatataatttttactgaaagttgtgggagaaatgaatagcgatacgattttttttgtaaaaaaagatacacatattaattctaacttaaacttcccacacgcagaatcgctccttttattgtgattctgcgttttttaacaaatataaaaggcacatgaccttttcattgctataattaaagtgaccaaacgataattctatgcatgaaaggcttgtgccaatgtctattttaccatctcctgaccaaaaaaatgaacaactattttcaaactcaatcatcagcttcatcaagaagtttcaggtgatcaagctgttgagaaaatgtggcttccgcaaggaaaaaggcattagcctgttcagcttgtttctttacgttttaagcaatgtctttcgtgaccgcagcttatatatgcagctgaaaacggatcattttaaagaaagcttttctaaaaattcttattaccgatttatgcgcaacgtccacgtcaattggctccacttcaccacactgctttctgcgcaaatcattaataatcacttgcgatctttgacttcagaaaaacgggctgattgctttgttgtcgatgattcctacttctctaggaccggcttcaagaaaacagaattagtcgccaaagtttttgaccatgtatcaatgacttacaagaaaggttttcgcatgatgaccctgggctggactgatggagcttctttcatgccaatcaattcggtgttgctgtcctctcacaagctacagaatatgattggcgaaaacaaagtctgtgatcagcgcaccattgctggcaaaagacgcatgcttgcccggactaaaggcacagacgtgatggttaatttaatcgaccaagctatgaaagcaggtcatcaagccaagtacgtgctgtttgacagctggttctcaaatccacatcaaatcgtccagctcaagcaaaggaagctggatgtaattgccatggttaaagttagctccaaaatcaaatatgaatttgaaggagaacgcaaaaacatcaaacagatttatcgtagctgtaaaaagcgacgcgggcgttcgcgctatctgttgtcaattccagtcaaggttggccgccaagacaaagacggtgctaaaattgacgctcggataatttgcgttagaaaccgtgccaatcgtaaagagtggctggctattatttgtaccgacatgtcgcttagcgaagatgaagtcattcgcaattatggcaaacgctgggatattgaagtttttttcaaaacctgcaaaagctacctaaaactaagcacggaatatcatggtctgtcctacgatgccttgactgctcatgtggctatagtctttacccgctatatgctcatgtcagtagccaagcgggacgacgaagatgagcgaaccttaggtgagcttttctattgcatgattgatgagctggcggatattacattcagtcattcacttcagctaatcacaaaagcaatggtggctagcgttgaaaaagtctttcatgccagtgaagcacaaatagcagaattcacggctgactttatcaatcgtttacccaaatacatgcaaaaattgttaaagaaaactagcaaaaatagtatagaagcccaaagctaagcaatatcaaagaattgccagcttatttgatgtgggaagtttaagttctaatataaacgaatggatattaagtaagggaataattcataaaagcactttaacaataagtaaaaatgaaagtagtactttgtttgtaagtttattcaagcaattaatacaaaatcaggaaattaaagttagtgaagatgatgaagagtattcagacttaaaaaaacttgttcagcttggatttttaggaataagaaataaaaataaaaaagtagcacttattgtggaagaaagtgcaaaaaacttctttgaaaactatttaaaagatgaaaatatatgtgttagctcattagatgagtttataactcaagatacattaaatattttaattgaagaaaaaaataatactaaattaaataaaatagttcaaaactataaaaataaatacaaagatgtagatttgatttttgtttgttctttgtattatgaaaattatttaaaaggaatcaacaagctaactaaattaattagtatcccatataatataggattttatgataataataatatatttgctactagaataatacatggagagactggctgctatcaatgtcttgaaaatcaaatactacaaaaatttgatggatatatcgaagattatgtatcagaaatggattctgaaaaacaagtatttgatataaaaaattatggagtattaatatctataattaagtcagagatagaagaactaaatttatactctgatacagagctacgaggaaatgttcttcatttttatttacctacttatgaatacaattttgataagaatagaattcaaagtgattgctcagtttgttctactataaataatattttatttaaagaacaaaatatgaaagcgtgcaatattttagccgaggttttaggtaatgataaatatcaagaataatttagaatataatttattgcgtcaacggatcttgggtggcgctataactggaatctggaaaaaggatactttctttattggcgaaagttcgtatccggtaatgaattataattatattactgcaaactttactaattttgaaaaattcgcttttcctggctatgttcccccgattaattatcatcttagtggctacggcttatcttataataaagctttatcggcttttctaggtgaaagtacagaaagatattctttttcagtcttatatcaaaacattaagcataatatcatttattctgattatcaaaatcttcagaaaaagtattctaattgttatatagtacctttaaattatattaatatttatttttcaaaagaagataaagaaaattatataactaaaaaagatccaataagatggatagcattaaattcactatttgatattaataaaaaggtactagttccgcttcagttttatattatgtataccaacagtatatttaaaaatgaaaaaagaattgtaaatagtgctacatcaacaggaactgcttcgcaagaaagctttgataaaagtctggaaaatgccatagttgagttcttacaaatagattcttttaatctttggtggtatggaggtctaagaggtaaaaatttaaatattgatacagaaggcttattaaaggaattgttcccaaacaataatagactttggatgtttttaaaaaaatttacggttaattttatagatattagttttgacaaagcaattaatgtagttgtttgcgaaattaccagtaatagtgatagtaaactacctaaatatgtagtaggagttcaaggaggattttgtttaaataagtgtattgaacgatccttttttgaatgtgtaactgttttagaatattgttttactcaaagttgggttgaaggttctaaatttaaaaagatttctacaaatatagatgatttaaatgtaaataatttagacgataatgtattgttttatgctaaaaatggaaagcctaaattaatcaaaaaagagaatattttaagagtgtccaaaaaggttactaatttaaaagatttgcttttgaatttaaagagcatctctaagtatgcaggatatttaaatattacgcctccagaatttagaaatcaaaactttgaaatatgtagagtatttataccagagcttttaccaatttctttaccgtcttatccgccttattatcatccaagatacagtaaaataggaggtattattaataatgtcccccatcctttggcttaaaatagcttttttcatcactttgtttccaggcggaatatatttgataataagaagaatattgtccagccatagaaaaagcatgacagtatatttaataaccttggtaattgtagctattgtaaataccattattttaaagatcaattttaataggtatattgaaatcatcttaatattgattattccttttacgtattatttttttgagtatgttataaggtataaaagattcaatatcttaagttttaaggctaataaaacaattatttatgttttagttttttttcctatatttgaagaagttgtttaccgtttctttatatttaaatattgttcggttttaggcttttctggaatacaggctatgatatttgcaacgttatgctttgaattttcgcacatatattatttaggctttaaagctattaataaattatttttttcctttattcaaagtatgttgtttttggtttttcaaagtttattgttaataatatgtttacacataatttttaatttatatgtgtatttacacaaaaaagatatgtataaagttattttttgatattgacttgtattacgtatataacaatatgtgccacacggtttctagaaaaatcctaaagagtgctaattttaaaagcaaaaattgttaagccttttacgcttctagtcagcattagaaatacgtttaagtctttcaaataagttcaatgaagcttgatttgaaaggcttttttgctactttgaactagaatgaaattctttgaaataataaggatttatttgaaattaacacaattcaaacacacagatacgattcatgtgttaagaatgtgcttgaaggaaaattaagagtactaaatatagtgatttaacaggcgttggagcctgttttttttgtgtttggttagggcattttgtttaaattaaattcagtggatttttgtgcaaaaaaatagccatattgtagggttatacatattgactattttctattattaaaattatttcaattcagccacaaacctaattccttgataagaaggaaacttgtaattatcccatgaaaaataagtgtctggaaattagttctttctatttaatctcaatgctatttcaagttagctattaatctgtatcctaagaatccattgctagattttggattccaagcaatacctacaccaatttttgtatattgaccagataaaagaatgtctctatgtccccaattagatcctgcatcatgataaatgaaattatttaagcaaatttttgcttgtgtagatggggtatcagtattatcaactgcacctccagcaagcacttctgcgtattgagtgcggcttccgtctggccttgtatggctaaaacttgtatttgcttcggtagctctagtccttgcatattcttgcagagaagtatcaagtgttaaagaatttagtccctttgattgacgtaattgatttaattgcgcaataaattcttgttctaatttggtagcaaaatcagaatccttaatgtttgtatattcattattgggttttgtatttgtggtttcattatgcttaataaaattgcttgaattagcactttgagtatttgtttcatcggatgtacttttagtaatagcagatgttttagaagtgtcaggttctgaaactttgtgagttaattctgaactaatccatttgttagttccaactttgtaccatgttttaccacggctatccttcttttctgcataaacatataagtattttttaccatgaattattttagtgcggtaagcttttacacttctgcctttcttgagtgttcttgctcctttaatacgcttgcctttatagttgtaaacataagcattgtgagtaagtcttacgctgttagtgcttgcttctactacattggcttgttcgttgccagcaacaactgtagctgaaagcaatagagctgatgaaagcgtaatggttgatagtaatttagtaacgtttttcttttgtaacatggtagttacctcctatattccttatttcagattagcaataagactgtaccctaaaaatccgttacttaatacgggatcgaaagcaaatccaactccaatttttgtatattgactagataaaagaatgtctctatgtccccaattagagcctgcatcatgatagatgaagcttctcaattgttggctggcttcttgctctggtgtacttgtgtcgttaactgttcctcctgcaagtacttctgcatattgagttctacttccatcgggtctaatatggtcaaatttagtattggcttcattagctctggttactgcataagattgaagtgtattatctatgcttaatggcgctaacccattggatctacgtaattcatttaattgagttacaaaagattgttcagtttcatttgcaaagtttgagtttatgatatttgaatacgtctgttcatttgaagccgaattattatcttgttgagtaatactttgtgaatctgctttttgacagtttttggaactatttctttttgtataaaatttatcagtgtcagtagcaagtatccatttgttatcaccaattttataccaaattttatcgttaactttttcttgagcataaacttttacagattgtccgactccaatgtattcgccagtaggtgattgattgggagctttatatgtttcacccaatccattatctgtaatttttgcagtgaacaaataatttgattttgtgttttgcacatttgcgagcctgatatagtgatgactaccaatgtataaatattttgtgccacgtattttcttagtgcgataggcttttacatatttgccttttttgagtaatttaacacctctaatacggttgcctttgtagttatagacataagcattatgcgtaagtcttacatttttagtgcttgcttccactacattagcttgttcgttacttgtaacaactgtagctgaaagcaatagagtggatgaaagtgtaatggtcgatagtaatttaacaacttttttcttttgtaacatattagttacctcctacggatattcattatttcaatttctaaattaatgatacatgatgtgaaaatgcatttcactgctgtttttctttgctggaattatatttatctctcgtaaatttataaaaaagtaaaagattgaaaagttaggtgcatcatttaatacaaaatataaactgaaatagattctcgttgaatttggagactgtaaaatagtttgtgtaaggatgaatgattccttaaatttatttctttaaacattagaaaaaggagttcctttctcgtatgattggtttgaacacaaaaacacatacagaaagaagaactccttcatgaatgattttaccaaagattttgctcaagctctattcaatccagacaaaataaatgatttattgcgcaaagagctacaacaggctgttaataacttgttagaagctgaattgactgcctttctgggctatgatccctatgccagaaatggctggaatactggcaactctagaaatggtgcttatttccgcaaagttgatacgcaatttggcccaattgaagtgcaagtgccccgggatcgcaacggtcaatttcatcagcacacgctgcctgactacaagcagcactcggatatcttggaaagcatgattatcaagctttactccaagggcgtgaccaccagggaaatagccgatctaattgaaaagatgtatggcagccattacagtccagctcaggtatcaaatatttccaagcagatgattccaaaggttgaggcttaccacaaacgcaagctaagcgacaagtttttctgcgtctatttggatgcgacataccttcctttgcgccgagaaacatttgagcgtgaagcagtctatattgccattggcatcaagcctaatgggcacaaggaggtcattgactactgcattgcacctagcgagaacattgaagtctggacagatatgcttcaaaacatgaaatcccgaggcttaaagcaagttgagctttttctttctgatggtgttgttggcatgaaaacagccttggccaggacttatcctaaagctcattttcaacgctgtttggttcatgtcatgcgcaatatctgcgctaaagtacgcgtcgacgatcgtgaaaagatcatgaacgaattcaaacaggtgcatcaacagacaaacaaagaagaagccacagctgtcctgcatgacttctataccaaatggggcaaggtttacagccatgttatcagaagcttgaaagacatagaaccagatctgctggtcttttataactatcccaagcagatcagagcttcaatttattcgactaacatgattgaatcatttaacaatgtgatcaagcgcaaagctaagcctaaggcagagtttccaactgaacagtcgcttgatgcttttattggcattcaggcaatgagctacaatgaccgttatttcaatcgaattcataaaggctttggtcaggttcaggacaccttagaatcctactttgattaaataaataattacttaaacttcccacatcaaataagctggcaattctttgatattgcttagctttgggcttctatactatttttgctagttttctttaacaatttttgcatgtatttgggtaaacgattgataaagtcagccgtgaattctgctatttgtgcttcactggcatgaaagactttttcaacgctagccaccattgcttttgtgattagctgaagtgaatgactgaatgtaatatccgccagctcatcaatcatgcaatagaaaagctcacctaaggttcgctcatcttcgtcgtcccgcttggctactgacatgagcatatagcgggtaaagactatagccacatgagcagtcaaggcatcgtaggacagaccatgatattccgtgcttagttttaggtagcttttgcaggttttgaaaaaaacttcaatatcccagcgtttgccataattgcgaatgacttcatcttcgctaagcgacatgtcggtacaaataatagccagccactctttacgattggcacggtttctaacgcagacaatccgtgcatctattttagcaccgtctttgtcctggcgtccgactttgactgggattgacagcaggtagcgagaacggccgcatcgctttttacagctgcgataaatctgtttgatgtttttgcgttctccctcaaattcatatttgattttggagctcaccttaaccatggcaatcacatccagcttcctttgcttgagctggacgatttgatgtggatttgagaaccagctgtcaaacagcacgtacttggcttgatgacctgctttcatagcttggtcgattaaattaaccatcacgtctgtgcctttagtccgggcaagcatacgtctttggccagcaatggtgcgctgatcaaaaactttattttcgccaatcatattctgtagcttctgagaagacagcagcactgaattgattggcatgaaagaagctccatcagtccagcccagggtcatcatgcgaaaacctttcttgtaagtcattgatacatggtcaaaaactttggcgactaattctgttttcttgaagccggtcctagagaagtaggaatcatcgacaacaaagcaatcagcccgtttttctgaagtcaaagatcgcaagtggttattaatgatttgcgcagacagaagtgtggtgaagtggagccaattgacgtgaacgttgcgcataaaacggtaatatgagttcttggaaaaattttcttgaaaatgatccattttcagctgcatatataagctgcggtcacgaaagacattgcttaaaacgtaaagaaacaagctgaacaggctaatgcctttttccttgcggaagccacattttctcaacagcttgatcacctgaaacttcttgatgaagctgatgattgagtttgaaaatagttgttcatttttttggtcaggagatggtaaaatagacattggcacaagcctttcatgcaaataaattatgttttggtcaatataattatagcaatgaaaaggacttgtgccttttatatttgtcaaaacacgcagaatcacaatgaaacaagcaattttgcgtgtgggaagtttaagtaattaaaaaatcaatttacgagaaagaactatttacacaaaagatttgacagtttctgaatttgacaagcaatatacagaaattatcaataaaaagtacgttttgctataccttttcataaacctgactacaatgagagttgaagaaggcgtttttgtatgacaaaagaatatgaaaaagaagtcaaagaagcagaaagcgtattggaggaccaaaagttaactgatagtgagatttcacaagaattgatttccaaagataatccaactgaaaatgtaaaaccatctgagattgatttcttgcgtaaaaagccaaatttgacaacgcaaattgatttcactttgttagctgatcttgctgggttatccaaggaagctaaggcagaagcggctgtatagataaaaattttacgtagaaaaagaagtcaaagaagcagaaagcgtattggaggaccaaaagttaactgatagtgagatttcacaagaattgatttccaaagataatccaactgaaaatgtaaaaccatctgagattgatttcttgcgtaaaaagccaaatttgacaacgcaaattgatttcactttgttagctgatcttgctgggttatccaaggaagctaaggcagaagcggctgtatagataaaaattttacgtagaaaaaagaccggtttgaaccgatctttatcttataaaaatttactttaggagcgtttgtgaaacttagctactccccaactgattagatagaaagtcgaaatcaaaatgaattgaatttttaattctaaaatgaatagtggaaagtaaaataaaacggaaaacaatagaataatagcgtaaattccttcgaatgttagaaataatctgtttctttttctatttttaagtgttgctagtatcattttttcattcacaaagatccctcctaaaaattatgaaattaagaccaacttaaataaggaatagtccatcggataggaacacctaggagccaatgtccggagctgagaaaagtgttttttaacacaacggtagtaacaattgcaataactgcgagtactaccaataagattagtaatgtactttgtttaatttttgacatgattaatgcatcctcctaatattttttaaacttctattattttgctgggataatgaccggtaattgccaccacattactgtagcctcctcccttttttaatcatttagtcggtttggttaaatactactccttagtgactagaacagattaattttgtatcacatagtttacaaattatttgggccaagttttaattaaatcttgataaccatatttttgtacttcatttctaattttttgcgcttcctctttattgtttaaaaataaattctttaaatataaagcagcaatcttataaagcaaaaaatgtatggttggttttgattccatgatgtagtcaattatttttggaacatgcattaattgaagtgattttttagaaagttttctattatagcaaaccgctagataattctcgaagacacgcaagtatctttcttgttctaattcggagatatttttattgcttttcatctcgttaagtagtctattgataaaaaatgcaagggtatcttgttcccagagcggcattgtattagtaaaaagtcgcagtaattcaggattagtcatccagttttgtccttcgttaaattcaatgaatagatctttttttattttgggatcgatttgatttaatttattttttaaatatgctacagaaatcatagctcttaattttaaaatcttagagtgagattgtgacagaatttcttgatagcatgattcaatttcatcaatttttcctacattgaaggcttgttccattttattatttaaatctgattcaatctttttttgctttgaagtataggttgctcgcaataattggtaaaagtaagtaatatcaacatcatgttcaaaaagaatcgcggctaatttatctgcactaattctgctttttcccgcttctactttcgcataaaaaggccgagtaacaatgttagcagccatttctttttgagtgaggtctagattttgtctaatttttcgtagtgcttgtccaatagtcataaaaaatcctttactctaaaatattttcttctctacgatatatgattattataaatgatgaaaatataagcggataaattaaagagaactatggatatcggaacggcattaagacatttgagagatgatctaggtttgacacaaaagcaaatgattcaggggacgaaaataactgttagtcactattctaaattagagaagggacaaaacaggatatttatcgaaaacctagtcgagatattgaagcaacgaaatatttctttatcatattttgttgatcactatcttaatgatgaaaatagtgaaaaagaagtaaattattcagaaatattaaatattgctttttacgaaaaagataagatcgctgctgaagaaataaaacgacaaattttttcagataagagttctagcaatgaattgagagatagagcaacattaattgtggatatgatagacaaccagggacagagtaatgttgatgctcgaatcattaattctattttcaaacatgacaactggactcagtatgacgaggcaataatattattgggtaatattattagaactagtaatgtattaaatatgagtcctttggtattgactctaattagaaaatataaagatctagataaagaaaaaatcgaaaaacaaagaaggttagcaacggttggaattaattatttatttaattttcgaaagttaagtaaagagtttaataaaactgtgctaaaaattataagctggattaaaacaacatcgattgttcctgagttaggcattattcgagaattaaatgcatattttttagcagtttatgaaggaaacatttctgtctcaactaatatcaaaaatgtccttaaaatatcaggttatcaaaatcttgctaatgatttacctaattaatcccctgagaggggattgagttgctgtggaatgagaagtagataaaatcatagttaattaaatatgaaagagaggcatagtaatttgattattgttagttatccagttttacctgaataactctgagttcatacagtacgaggagatataaattatgaaaaaaagattttgttaagcctaagtttagtagtattaggaaatactttgttttttaattcgagtgtagcttctgcagcgactaataatagatattccgtaaataatacaattcgtcaggcacctaatactggcgatgttcctggtggatggggcattactcctggtcatacacattggggctaagtgatagaagcgatgaatgaattttcattgctctttttattttgggatgcgaattttatgaagaaaagtaaaatcatatttttaatagagcttgtattaaatattattgctgctgtttttctagtaataaataattcattcaaaaatttattagatgtaggcgttgtatttttactacttctattgcttatttggaattttttaagaagaaaaattgagattagtttaaaactatcatggctcaatcttatgatattaccagcaatttttacttattgcttaaatactgtagctaatgttttattggtaaaatatcctgttaaaagtgttttaatagctataatttatagtttgttattcttagtttatttgcttccggtagtaattactaatgcgggattggttaagaataagtatgctagagtttttattgcaatgtattatattgtgctattactttttagcgaaaacttacatatgaatgactacttatcatcctttgtaaattggtctcactctgaaattcttaatgggttagcgttaattccaatcatattttgcttatttaaaagttgggatattcgagcaaagcttaatcttaaatttaggcgatattcaaatatacagttaatagttttattagtagctgtattctttgctgcttggtattccttctttcatagctatgtttatattgcaccaactttttcgcaattattttggaattgggacttctcggaaattatcccaactgaacgagctgttttatggagtttaggagcgattttattcgaagaaggattccggtatctattaataattgtattgcttgaagtttttaaagtgcaaaggggtcaaattgactattttcttgagtgcgctattttttggattgatacattatgccggactacttgaccaaggcccaatatttataatttcaacgcaagcaatttttgcttttggttatggctgctttttggcgacactgtacttatattctggaaaattctggttagtattgctttcacatttttcattagatcttattgcattctcgctttctgcaggtggtggcggaatactatcatggtatggcaataatgatctcttgagtaatggtttgagcatggtttttgctttagttatgacattgattatgtttttaggtaaacaaaggaaaattatgcaagaaaatgctgctagattaattaatgcatgatgcatttaagatggtcgaaagatcatcttttttatgcaataaagtgtcatatataattgacacctactataaaagttgctattattttaaaaacgtcacatataaatgacatctaactagatgaataaagaagaattcaatgaatcgagtaagagaatatcgtaagcaaaagcaaatatcacaaatggagcttgctagacgaataggggtggcaaggcaaaccattaatttgattgagaatgataagtataatccatcgttagaattatgcctaaacttggcgcatgcattaggaacggatttgaatactttgttttgggatggggatgaagcaaaatgagacgagaaagtttatggcttaagtttgtcagatattggtatggcattgatagtaaattagacgagcggcaattagcagaggttgaacgaatcggtaataatgcctatgtaatctctggtatagtggaactgatcttactggttatcacgctaattatggcattgactattaaaagtgagctggctttgtggtttttacctttggcgattgcaattatgatgctgatgatgagtgcttatacttatttgacaatgcgaaaatttaaaatattctctgtcgaaattacagcagatgaacgccccaaagcaattcgtagaatatggataaaggctataatagcgggaataattggtgcagtttttggtacattaggtagcgcgctaggagcttcttctgtgcaaaataatctagtaaatgtgcttgatttttggccacaaggtttatggctaggcgtatgttgcggtgctggtagtgcgattggaagagtgcaacgattgaaagtaattaaagaagacgaataagcgaatcgaaagtagtcgatccgctttttttgctgaaaaactatataattaaagtaacaataaaatttacagcaaggcaaaaaggatgaaaaaacaaaataagactggctcaattggcgtagtgggtgccacggccatcggtgttggtggcatgatgggagcaggcctatatacattgctcggcttggccgccaactctgctggtgtttggctgccagtatcatttctaattggaggcattgtggccgcattttcagtttattcgtattcaaagttaggaatgaagtatccagatcgaggcggtgccgctaagtttttgctaaaagaattcggagatggcctgctagctggtgggatgaacgtcttccagtatatcggctggattatcgccatggcgttatatgcgaccggatttgcggaatatgcctgccaactattgggaaaatcaagctcaggctggctaggtaaggcaatcagtatcggaattgtcatcgtggttgtggcaattaatattatgggttcaaagcaagtggcacgtgcgcaaacggcaattattgcgtttgaattgttaatcttactgtcttttgtagcggtaggtttaactaagctgcatgtgccgacaattactagttcaaatagcggcaatattgtaggtatcctatctgctgcgggtttactttacgtaacttatgaaggttttggcgtagttactaacgctgcagggagtatggtaaatcctaaaaagcagttgccacaagcgctgttcttttcattagggatcgtcatggtgatttacattgtagctagtgtagtcgtggtgatgaccttaggcgttcaaggcgcagtagctaatcaaggccacgttttggcaacggctggtaagctagtattaggcaactggggtctgttcatcacttcactgattgtctgcatcttcgttgtgattttcccattatcagctgttggtgagatggccagcctagcctttttattggtgtatgccatggttaacttaggccacttgcgcattgcaggacaaactggggccaagcgctggattttgatttgctctgttgtattgaatctagctttgtttgctttgttgtttattcagacaattctcaaccacgaaactttaacttggatttcagtaattgctttgttaattattagttttttagttgaacttgcttggcgaaaaaagaataaacgcaacctgcattgattaggaaaaaaatagtaatttatgatacaaaaagtcgacttttgttccacttattgggtacaaaagtcggctttttgtttttttcgttgtcaaaacaatatctttaatattttaattcagatatactctctttgatcaagtttgaagtgagggaaaatgaatgaaaaagttattgatcggaagcgcagtcttagctgccttattaattaaagaaaatatcgcagtaaatgcggcaatagagcaaaacgaaacaacgcctaagattgcagttactgacaaaaaagagaagccaaaagaccagtctgataatagttttgcaggtcattatgaccaagagacaaattttattacctgggaaataaggctgaatcccaagaaagaaaaatatactggtgatttgaagttggaaaatttaattccagaaggcttagttctagatccagatacgattgaagtaattaagaatgataattttattcaaaattctagtttagttaaattgaagaaaaacaaattaacagctgaatttcctgctaagaagtattcagagagcacaattttgattaagtatcgaaccaaggtggaagcagagcctaatgagcctaattatcttcgggtgagtcagtcctttactttgggcgatgatcgagttcaagaatacgagcaagaaattaaatacgatcgaagtaataagaattttaacattgaagcgccacataaatctacgtttagagatgataatcaaatttcgttaattaaaaaatctaaaagtaatgaagaacgctctgaagattggcttaaacgtctagcagagctgattattaataaaaaagaaactacttcagataaaggaggtgaaaaagttcaaggacaggtcaaagatcaaaagcagcaagcttccccagaaaatacaaacctttcacgcactccaactgtcaaaggcttgactggttttgatactaaggctaacgaggtaaaatccacagctaaaatagattctgattcagtaaaaactactctagataaagacgagattaaggacaatgcaagtactatctcgcctaagtcgcaaaaacacgatactcatgtcacactccctaaaagtgacacatcagaaactaaggcaaaattacctaaagctggtgaaactgccggtgttatgctcagcgtatttggcataattttaataattgcagggtggacagttcgaacaaaattcttaaaataatctatatttgtactaaaatacggattttcaatagccaaaatagactctttcacgtattatttagatagataaacttgtatcatgaaagagaaacaaacatgccgtacactatttcagaaattattgttttattttttacttattcagttatcggctggctttgggaaaccttttattgttcgatcaaagaccaccattatgattatcggggatttctgtttggtccttactgccccgtatatgggttcgccgttactacaattttaatttgtaccaaagacgtgcgagataacctgctccttttatttatagtagggactatcgttgccactattttcgaatttgtggctagttggctattagagacaatctttcacatgaagctttggaattattcaaaattatggggtaacattcaaggtcgagtggccccaatgatttcattattttggggcgttggtgtagttttattagtaaaatttattcagccaatcattcagaagctcattaataatgaagaaaagataactcatggctggctagctgtgggtattaccattgttatgggtattgacttagtattaacagtaatcagtgtcgagagattccatactacaactaagatgtgggatgtgcatattaaccactttattgagcgagttagaactaaagtagaaagtcatatgcctgagaaaggaaaattgcgggttggtgattggcaccactcagtgatgcagcactatgatgaattacaaccgcaacgattaagctggaatcataagcgctacttgaagagctttccaaaattaaaagttactgatgctcctaagttcatggaaattaagaaagaagtcttgaagaaagaaagctaactaacataatcttattttgtgggattgaaaaaagtcggatgatcatattaggtcatccgactttttcttatccattaattctatttggttcacgttttttactttttatttcggtgtagttatctaaaacgttggcatagcgtccaagggtgaaaaggtaatcagataatcgattgaggtattttaatacgtcatctgataattcctgttcatttaaacttaatttgaccaatataatagcaacaccatcaactcctgaaactactgaagaagaacatctgacagtaaaagatcatgtgggttcatcaactttaagaagaggattaccacaaactggtgaaaagaaatctactttgaatgcaggctttgcccttgctggcataggcttggctttgcttgcagggatgttgtttgatcctaaaaagaagcactaatactgaataagaattaagttcgttaaagatcgaatcattttgggttcgatcttttttagtaacaaaatttaaaaaatcccaccttcgtgaataattgaatactttatatatttcaatcgtccactttagtgggattgtattaattcaggatgatctttttgaatttcctgtttttgaagggcagaccaagtccatggaagagttttttagtcgcctagaaactataggcaaggcttggcataaagcctatgataccattgattccgatacagatagagtcattaagagaactaaaatggatgctcgtactacgttagacctactagaacatctatcacctgtacagttctcttgaagagaaaaagaatatcagcacgtcaccagtatggttcttagactatgatcaaaaaatttattgtactgatgatgccatcattggtcagatgcttcaaaccattaatcatgacattacccgacgcagcagtcgtagcttattacactggaaaattcttaaacaaaattgttccagaaatttttatttttgatggatgttattttttgcttggctctaagcgattttatttatcaaagttaatagttctatgttatattataagtgttataataatgtaaaaattattaagcattgaaatatagtgcattatgatacgaggagaaagatcatgttagaaagagtcccaaaatatacactaagaaaactgtcagttggcttggcctcagtgatgattggatcaggaatactgatgaactctccaaaggtacttgctgatactattaacccaaatgaaggtactagtactgctgttcaaccttctagtcaagataaagataatagtgagccaagtactcaatctggtgctactcaagatgaaaacattgattctaacgcagctgttcaagagagaagcgacaactcagttactgaaccagcaaccacaactaatgctgaagaaaaagtagtggcaacaaatacccaagatactacgcaagataaagacaagcagacaaatgcgaatgaaactacgcaaaatactaccaatgtcgacaaaaaagatactgaagtaacgccgactaacgacgcaacaacagctacaccgaagacaaccgccaaggttaacgcaccggctgcaccaacagcaatgaaggcagcagctactgctgaaacaccagatccaacggttccagataactcagctaatactgctattatcaatgacaagaatagtttggaaaaaatttggcttgaaacatctactgcgcgggcccaggtctacactaccgttaagggaactgatcaaaaaatctatgtcagttcctatgcagaattcggtaagcgacttaattcattaatttttactaatcgctttgatccaaatagtctagaattacacattgaatatcaggtgttaaaggatagggttcaaaatttcattgtaaattggggagactggctccgactagataccagtagaattggtaaagatggtctaactttcactacagatacaggtgaaaaagtagcctatacgttaacaccaggatggggggaagtacaaaacctatgatgaatggcttagtgaaggccaagatatgagtaagataaatgctcttaaaattggcaacaatttaaaggccgggactaacttcgtattaaccgttcccctaaaatatattggtagaactgatggcacaaagcaatttaacaatgttcaagttgtagattacgggcagccaaatgctaatatggtgttcgattttattgaattacatccagagcaaatcgatactccagaagctccaactactgataaagagtcagttactaccggtatctataacaatccgttagctactgctacagactggtataaaacggagcatggtgaatatgttgcatactatacagctaaagggaaagatggtaagacctatgtaactggatatgtggctgccaatggtaagtctgagtcgattatcaatgttgatcagattgatctaaataccttggaataccatatgatttaccgtaatggtgacgaagaagtagcggccggtatttcagcaagctttgctgatggtaagactctagtggttgatgctagtcgtataggtgctgatggtatccgtttgaagagtcaacagggttggtcttataacaacgggggttatagagagaatactagtgggagactctattatagttgggaagattttcttaagaaccataacggatcggtagataacctcgttggcatcaatatgaatgcatccgctttcaagccgggcgatacaattgaagtagttgttcctgttaggtatattgggaaactttctgatcaagttcaatccttagaatttaaatctgaagctagaaaagatgtttcggttaaactctacttcacaactgtgcgcaaggacttaagccaggttaagcaggtagtcttgcttccgactgagttcatgggagaacaacctggtcaatcaaactggaagctggttaaggaaattgaaaaagatatgccaaatgggtgggaggccattaaaattagtaacttcccaacctataagggatcattcaatatggattcactaccaaaaggggacttaccatcggttgtttatggctctgcgcaatactttgttgacctccaagaaattcagaaaatttttgctaaccatggttacacggtcaagtatgctaacaacaacggtaaagctcaggaaatgccattctatggatacgttaccctgccactggcccttattgatggtggtggtaaacctgttgccccatctatctggacaatccaagttcaagctgtgcctgctattattttaaataaagatcaacactatgtggcagatccgaatgctaagccatgggacaccacttcaatgattgatgagatttatgctgctgatgacgcaggacagcggaagacgcgcgatcaactagaaaagttgccaaagacggacgtggatattagttatgaataccaagctccaggggctgctacagctgctccggttgataaggtcgacttgactaaggcgggggtatacactgtcacttacagtcatacttatgctgatgggcgagtagttaaggatagtcgcaaggtttatgttgatgatgttaagcaagaaaccaaggacattactcgaacaattattgtccacgagccaaacggaactgaccaaacagttatccaaaaagcaacattgacacggaaagtaattcttgatgcaactactggggaaatcaaatctgtgggtggatggtctactgctaagtgggaaagatactcagctccagaatttaaaggttacactccagccccggctcaaattgatgaaactgctgtgaacaaggacactcaggatacaactgttgagattagctatacagctaatgagatcacaaagccagaaaccaaggacattactcgaacaattattgtccacgagccaaacggaactgaccaaacagttatccaaaaagcaacattgacacgggaagtgattctttatgcacctactgggaaaatcaaatctgtgggtgaatggtctactgctaagtgggaaagatactcagctccagaatttgaagattacactccagccccagctcaaattgatgaaactgctgtgaacaaggacactcaggatacaactgttgagattagctatacagctaatgagatcacaaagccagaaaccaaggacattactcgaacaattattgtccacacgccaagcggaactgaccaaaaagttatccaaaaagcaacattgacacgggaagtgattctttatgcacctactgggaaaatcaaatctgtgggtgaatggtctactgctaagtgggaaagatactcagctccagaatttaaaggttacactccagccccagctcaaattgatgaaactactgtgaacgagaacactcaggatacaactgttgagattagctatacagctaatgagaccccagagcaaccagataacagcaaggacaaaggtaataatgacaacaatggtggtaacaattcagatgcgattgtgccaataaatcctagtgacaataactcaaataattcaaataatgcaccaactgacaataagaagactgatgacaccaagaaagataatactggcaagaagattacaaaggagactcctaagaaggtaaagaataataagtctaacaagaccaaatcaacgactacttctaaatctaaccagtcttcaaaggctaagcgaaccactaaatctggtacgattagtcctaaggcagtcgctttagctaatactactgctggtctagctacttcagctaaggcaaatatggaaaacggtattgccaagaacaacagccaaaattctcaaactttgccacagactggtgaaaatgaaagtaaggtagcatttgccgttgccgggttgttagcagctgctttgggcatttttggtatagctattaatcataaaaaagaaaattaattagctaagttgaataaatcatacaaaaagacgcatagaatagcaatgtcattaagttaagacattgacgaaaatcagactttatgaaccgaattattttggctctttgtcaaacaccctaaagtataaaggtagatagaaacatgacgatgtttttatctaccttttttcttatacttagattgagcttgcggttgaacccttcaaggcagccgttagaataaggcagttttgctccattaagcacagcttttaggttatgtttaaaggtcaatagtgttttgtgcattaaagtcccaatttgatcttggcagttgattaataagttgagctcatgagtattgcccgtttcaacggcttgaataaagctttgcatcaggttatatgaattctctaaggtagtgctggtattgatgccttctgtaactacttgtgcttgagttaagcagtctttgtagtgccagttatagtgaggatgaactttttcaagttcatcaaacttcttcaagtataatttccaaggagacttaagcagctgatattgccgcgatcttttatcaaaggtcttcatgacttggaacctcagcgagttgaatgagcgcgtaagcatttgaatcatgtgaaaacgatcaatgacaatctgtgcattaggaaaacaagctctaacgatatcttgatagtaaaaattaagatccatcgtgaccgttttaacgttagctctagcttggagcgagaaacgaccaaaatacttaagcagcgtcttcttgtagcgagttctaagaatctgaacgacttgatgattatcaccatccaggcagataaagtgcagctggcggtaactcatcaaaagctaaatgagctggcaaatattcgtagctgtcaataaaccggtgtgaacagttgcccagtactctttgaacagtattaattgaaatattgttttctctggcaatgctggtcatagatcgatcttcagttaaagctgacaacactttaagcttagaggcattagaaatagaacagtatttaccaattcagactgagccatagatcagcgctcacaagtgcgacatttaactcgttgcttagctaatcttataatgaccggtaagcttgcattagctgtcggatagtgaatgttggtaatcaaatggccattatgtaagagatctagggagccgcagaaaggacaagcaggttgaagcaattcagcttcatagattttatgcttttgcagtttgatcgatttatagaaatcacctttatttataagaatttgtgtggaaacgatttttattgaagaggactatgtcctcttttttgcaataaaaaatcctgttaacagcttatcatatagataagtcatcaacaggaaaaattatagagccaatattttgagattaattgataggggttgaaaagtaaattttatttgttatagaaaatatagaaaaaggattgttcaagaaattattttacgaaacctgcagtgaaccaagtgttggcactaggcttaagtgaccagccagtgaccttcttgttaacagcagtgattgagtattggttggtagttggcacaacgtatgcttcatcatacatccacttttgccacttcttgaaggcattagcacggtaagtaggattgaaggccttctctgagtcgatatcagccaaaagcttagtttgcttaggtgaaacgaaacgagcaaagttgtatggtgcagcttcattgtaaaggtcgttaggggatggttcacttgaaagtgaccaaccaccttcgaagacgtcgattcttggatcgtcagattgaacagcttgtacccagttgttgaattccattggacggccgccgacaaatttaacatccaaaccaactttcttccattgttggatgtagtttctccaaacaggttcagcggtagttgagttgtttctaacagccaagttaattactaacttcttgccgttaggttgaactctgtattcacccttcttcttgtagccggctttatccaataattcgttagccttcttcaagttgtatgggtaacccttgattgacttgtcagtataatcaccaaattgttcagggatcaaagtgttaacgcggaaggccaagccgtggtagtaacgtttagcgactgcatcaacgttcattgcataagccattgccttacgcaatgatggattgtccatcttggagttcttgttttcaacgttcttgccagacttcttatcccatttacctaccttaaagcctaagtagttgtaggataggggaaccttaccaatgaagttggtatcagtagcgttcttaacatcatcccattgggtgttaactacgccagctatgtcgaacttgtgactcttgatggcttgagtaactgagttggtaccgatgactgtcatggataccttttccaagtttggtgtaccacgccagtaatgcgggttacgttcccaagtgacagattgaccacgaacaagcttgcttacgcggaatgggccgtagaagagtggttgttttctaaccttgtcactagacatcaacttggagaatggtacgtcctttaagtaatggtaaggttcagcgtattcccagaagtaaccgttacctgattgaagcataccaggcttcatttgtttcgaccttgcggccatcttcgccatcaggcatctcaataccagaaatcttcttgctcttgccttcgtgatattctgctaaaccaacaatgtcggcaagagaatcggtataacgttgtgacttggagtctttattagcgataatttcataagcgtattccacgtctttagcattaacttgcttgccgtctgaccacttaacacccttcttaacctcgatagttacggtcttggctttacggtcaagcttaaaggtagcagcacctttattgttaatcttgtattgatcgttgactgagaataacccttcttgtcctggctctgcaacttcactgtcagtggcagtatcagataattctggcaagaaaataccagtgaagggactatcagattcgatagcataatttaaagtgccaccttttttaacacttttcacaggaacagtttgactgaatttgtgatgtgtttcatctgcattattattttttgaatttttattattaccacaggcaaccaaacttaaagctgccccagaaacaagtgctaatgcaccaaaatatcgttttgctttactcattcaaaaagcacctccaaataaattaaaaatatttgagttttattctatgatattaaaatgaaaaaaacaatagaaagatgaataaaaatgtgaaaaatattatttttaaattatttttgaagctaagattagttttctttcttggctaattaggcatagaataaggaaataacagctttttatgttggaggaaaatatggatacagcctggcaaaaatttaaaaataatattccattacgtcgatttgtggtactgctattaattattgcctgcctttatgaaatacgagcaatgatgaacacagtattattaacttttatttttacttatgtgatcgtgcatttaattcatctagtgcagcggtattttcctaaaataccaacaggcctaattgttgcggtaacatatctaattatcttggcgctactttatttcgtggttaccatttatttgcccatgttagttggccaaatatctaaaatggtaaagtcagtgatggcgttttatgaatcaaatgaatcatcgcgcttagccagccatgtaacgcgttatatcagtaaaggtgagattgttacgcaggcaaaacgagttgggacttttgctctgcatacggtgaccaattttggtagtttaacaattgctacctttatgtcattgattttgagtttcttctatacgattgaattagatagaatgattgaattttcaaagttatttgttaaaagtggttactttaaatggctttttgaggatattcgctattttggtaaaaagtttaccaatacttttggtgtcgttttagaggcgcaattctttattgccatttgtaatacggccttgacgatgattggtctggcatttatgcatatgccgcaaattattgccttaggcttaatggtctttattttaagtttagtgccagtagctggtgtgatcatttctttaattccattaagtattatcggctattctgttggtggcattcgttatgtgatttatatcttcattatgatcatgattattcatgcaattgaggcctatgtgttgaatcccaaatttatggctagcaagactgaagtaccaattttctatacttttttagttttgttagtagctgaacacttctggggtacttggggcttgattgttggtgtaccgatcttcactttcttgcttgatgtcttagggattaaatcggcgaagaaaagtaaaaagaaagcgaataaataatgagagtacttttgacaggtgatagcattattgcacgccaggaaggaaaaaatgaaccgcatcttaattggaatttgcaccaattattgccagatattgaaatagaaaataccgctgtttcggggattaactccggggccttttttgccaaattaaatgaattagtactaagcgtaaagcagtgcgataatttggtgatcttgctgggaaccaatgatttggctatgcacaaacaagtgccagcaaggcaatttaagcaaaatatggaaattatttcctcggcaataatttgtcaatattacccaccacatgttctgcttgtttcgccgccagctgttgatgaagctaagcaacgtgtacggaataatacgttagtagcggaatatgctcagatcgtgaaagaagtagcacatgagtatcattttcgttatgcagatctggcacaagctatgcgggatactggcgatttaagcgagatttgtcaaggagtaaaaaacgatggacttcattttggtgatcgtggctatgagattttaggaaaactaattgctgaaaatttgaaacaaatgtaaaaaggaccgcaatttgcggtcctttatttttcgctattttaatgttgcccaaagcaagcttccagctagcgcaatggccaagaacggaatgagcaaataggcaaaaaagaaaaacataattcctacgactagtaaaaagccgataattttaatgaggccaattcctaatttaaagaatagccagagtaagagtaatgttaataataaagaaagcatattaatacctccataaatctatgagagtattttactaccaaattggacgaatagaatagtaggaagattaatgctttagaaaaatttagttaccggtaacaagataaattatattgaaagctctttctgtaaccgctatattttaactattgaaagcgatttaagaaacgagaggaaaaataaatggaggagaaaaaaactgggttacctacgctagctagtacgacaatttggatgattagtttggggtatttgggtgtgcaaatcgcctttactttggaaacatcacagatgagtcgaatcttccaaacattgggtgctgatccgacaaaattaggctggttctttattttaccgccgttagctggattggtagtgcaacctggaattggatcattatccgatcgaacttggattcctaagattggacggcgtttgccatatttattagtcggtatgatctttgccgtaattactatgattttgttaccaaatgttggtagttttggtctaggctatggttcaattgaggctctaatatttggtgctgttgcaatcgcgatattagacgtggcatcgaacatggcaatgcaaccatttaaaatgatgattggtgacatggtcaatgatgaacaaaagtcatatgcctatgggattcaaagcatgttgtccaactttggtgctgttattgccgcatttttcccgttcttattaactagtttgggtgttgctaatactgctaaaaagggtgtggtaccacaatcagtaattatttcattttatgttggtgctgccgttttagtcattacatcattgttcacgatattcagagtacatgaatatgatccagaaacctacgctcgttatcatggaattaaagaatctgataatcaagaaggcggtggttggattgaactgcttaagaaggcgccaaaagtcttctggcaagtgtcattagttcagttcttctgctggatttctttccaatatttatcaacttacgctactggtgctattgcacaaaatgtttggaatacgaccaatgcctcctctgcaggctaccagattgctggtaactggtttggtgttttaactgctgtacaatcaattgcggcagtagtttggtcatatgttttagcgaaggttccaaataatcaccacaagctaggttacggtatcagtttgctactaggtggagtaggatatacttcaatcttcttgattcattctcaggggtttttaattctatccttcattttaattggtatcagttgggctggtatgaatacttatccattgacgatggtatctaatgctttatcaggtaaacacatgggaacatacttaggattgttcaattgctcaatctgcttacctcaaattgtagcatcactgctcagcttcatgattttcccaatggtgggtaactccatgccagcaatgatgttgattactggtatttcaggcttcttaggcgctttatcagttttagcaattaaggaaacctacgtaaaatagcataatttttccgataaaaaaacactgcgtgcattgtcaatgtcattaagttaagctattgacattggagaaaaaacaattaaagcatcatttggctttagatagccaatttgatgcttttttgtgtacgccaaataagcgtagtttgtatttcttttttattaggccacgcgatacatgtaatatactgcagacttggcttttaaatttcgtttgtcttttcgcctttatttttgcaaaaaaaagaatcgaatccaaatgattcaattcctaaaaagatcagttttcaaaagtcaatagcttaacttaatgacattgcattttgaataactgcggagatttttggtataagtcccttaacgatgacctcggctcttattataataagaaaatccgcaaattcacagtgttcatattatagctgtcgttcactcttaacttataatcctaaaataacgttctaatctgtgaagtattgcagaatatcctcctcagttaggcgttttttgtcgtcgcctttgacatcaaaaacgattctaccattgtttaaaatgatagtgcggtttccgtatttgattgcgtcttttaattggtgagtgatcatgacacaggttaaatgctcttcttgcacaactttatcagttagttcaagcaattcgcggctagtatttggatctaacgccgcagtatgctcatctagtaagagtaaatcagggcgcttaattgtcgccattaaaaaacttaatgtttgtcgctgaccaccagaaagattacccacaaaagtatttaagcgttcatttaacccattagggagttgggccgcctggcgtttaaattcttgcatatgtttatctaggcctcttaaacgcagaccgcggtgttcacctcgtttggttgcaagtaataggttttctgcaacagtcattcgcggagctgtacccattttaggatcttggaatacttgggcaatatatttagcgcgttttacttcagaaagattggttaaatcttggtctttgagcagaatttttccgctagtaggaaaaatagagccattgataatatttagtagcgttgatttaccagcaccgttggttcctaaaagagtaacaaaatctccatcttcaagttttaaattgatgtttttgaggatttgcttttcctcattggtaccagcattaacagtagtagtaatattttgtaaatcaagaatagtactcatggtttttcaacgcctttctttaataacttacgagtgcggaatttttgttcaaataatggaagcatcatgcaaatagcaagaataatagcggaaatcaatttaaagtcgttggtactaaagccaagttggaggactaggagtaagataaggcgataaataatactgccgataacaactgctaccaagcgggcggttaaacttaaattaccataaacgacttcaccaataatgatggcagctagtccgataaccatagtaccaatacccatattaacgtcagcgtaaccaccgttttgggctaataatccaccagctaagccgatcaagccattagaaagcattagacctaagattttcatattatcggtattgatcccaagagattgggccattttttcgttgtcaccagtggcaataaaggcttgaccaagatcagtatcaaggaaaactgctagcaaaacgatgacgataatggcaatgatcaaaccaacaacaatagtaggaaaattgatcggtaatttttgtaaaagctgaccgtttagtaaagtatttttgttaagtaaaccaacattagccttgcctagaattctaagattaactgagtagacgccagtcatcgttaaaataccagctaaaagaacaggaatttttcctttagtatatagtaagccggttactaagccagtgaccatgccagcgaagaaggaaagaatggtagctgctaaaggattgacgccatgaactaaagcactaacacaaattgcggcaccgaaggggaaggttccttcaacagtcatgtctgggaaatttaaaattctaaaagttaggtagaggcctaaggctaaaataccccagagtaagccttggccaatagaagaagtaattaagctcatttgataattcgtcctttcttttgggcagcttgaattacactgttaggaatagtgatgtttaattcatgtgctgctttttcattgattactgtttcataatgggttacgcgtctgactggaagagcagcagggtttttaccatgtaaaatttgtcctgccatttgtccagttaagattcccatgtcgaattgactgacacacctggtagcgagaccaccacttttaaccatagtatcggcagcaggaaaaactgggatcttggcactgttagtagcctttaataaggtggcaattccactagctacagtattgtcggttgggacataaactgcttgaaccttgcctaccatggtttgggcaacttgttcgatatcattggttgaagtgatagtgtaagggataactttaagtcctgttgcttcagctagtcgtctgaattcacggtactctgatgctgatgaatcatcacttgaggtgtaaatgacaccgatgtttttggctttaggtagaatttcttgcattaaggccagctggctggcgattggctggcggtcctggacaccggtaattttaccgccgggatgcgctaggctttttactaaatgggccccaagaggatcgctgaccgcgcccataactacagggatgttgccagaagtattagctagagattggacagcaggagtggcaattccaatagttacagtcgcattttcctggctaaaacgatcgctcattgatttcagattactttgatcaccttgggcattttgaaaatcaattttaagattttttcctttgacatagccttcatctttgagaccctgaataattcctcgatgaatctgatctagagcggggtggctcattgtttgcaagataccgacagttggcgttttcttttccgcatttttcttatttacttcactgacaaatgcaactgccagaaaagcaaaaagagcaataattgttccgattaaccttttcattctttttctccttcaaacaaaaaaggcacttccttttttcgggaaatgcctaaaacaaaacccgcacgttattttccgtgcgagcaatatttcttgaagattttaccagcacagatacgatcttaatgagtcgcatctgtacttcacgaacagaaacaactctagtgctggaattgccaacgattgattgctgtaaatttaatcatgataaaatcttcctttcgttcaaatttgttagctaaattttaagtaattatgagaaagatgtcaaatgattttttgttagatttatttagttttgaataatttttaaaatgctataataattattccggcaaccatcataaaaagaagggaggaattctcttgcgctatcaacaaataatttttgatgtagatgacacaattatcgattttgcggcaactgaagattttgctttacatagcttgtttaacgctcatcactggcctttatctgcggaattgcagcggcagtatcattcttataatcaaggactttggcgccaacttgaacaaggtgaactaacttatgaagagttaagtgaaatgacttttcatgattttattttggatcattttggcattgagattgatggcaagaaggcaatggatgaatatcgttcatactttggtgaagcacaccaattattgcctggggttgaagatacgttgaaatttgctaaaaagcagggctataagctgaccgttttgagcaatggtgaaaaatttatgcaaaatcaccggttggagcttgctggggtgaaaaaatattttgacttaattgttacgtcagaggaagcccattattctaagcctaatcttcatgcctttgactatttcttcagtcgaactgagatcggtcctagtgagacagtcttttttggggacggcctacaatctgatattttaggtgcagaaaaatatggctttgatagtatttggtacaatcatcgccatcgtaaaaataccttgcatttgcatcctaagtttgtagtagaaacttatccagaattggttaaattaatgcagaatgattttgagaagaagtactaatcattatactttttgctcttcaagaagatgccccaaccaatagttaataagctgacaaaaattattaaaatccaaaagccgttttcattttctttacctggtaagccgccgacattcatgccccaaatgccactgattaaagcgggaagagcaattaccagggcagctgaatctagatatttcattaaatgatttaggtgactgtccatcatggcggtaaagaggccgctaatggaattgagcaagtcagtgtaaacgtgaatcattttggtaattcgtttttgcttggtcatgatacttttgacgcgggcttgatttgctagcttgttttctactaaataattaccaaattcttctagactaggtgtttgatcatctaaggtatgctttaagtaaactagctggcgagttaaatctgttactttttttaattctttggtcttagttgttcttcttgcagcttgatctaaatggtcaattttttgtttaattgttactaattctgcatgaagatgcttgatttggatacacaggctttgaaaaattgtttcaataatattttcttgcggttttaattctgaaagacttcttgttgtgccaataaagagatgattttggtcaaaaattgtaaaaattggaattagctcttgttcaattggcaagtcattacttaatagatcgaaactcactaataagtgaccattttttagtttattagaatcaatagggataaaacgagcaacctcaatcgaggaattagggtaagtgaaaattgtaggatctagatcccattttttgattaaatgatcgatatcgttttgcgtcaattgatcttttaaaattatattctgactattagtaagcatatttgttcacctctgtttcttttttagtttaagattaacatgtaatgttttttagactgaattaagttgacttgaaaatatgtttttttaaaaaatatagaaaggtgagaatatggaattacattcacttactgatacttatactttgaacaacggcgtaaaaattcctgtaattggtttcggtacttggcaaacaccaagtggagaagttgcaagagaatctgttgaagccgcacttgaggcgggataccgtcacatagatactgctgcagcttacggcaatgaagaaagtgttggcgaagcaattaaacgtagtggcgttaaccgccatgaattatttgtaactactaaattgtggaattccgatcatggttatgacaagactaaaaaggcaattgatactagtctagaaaaattagatttagactatcttgatctttacttaatccattggcctaatcctgtagctatgcgtgacaactgggcagagcttaacgctgaaagttggcaggcgatggaagaagcagtgaaggctggcaagattcgcgcaattggtgtatccaactttagaaagcatcacctggatgaattaatgaagactgctgaaattaagccggtagttaaccaaagttacttgaatccgagtgatttgcaaccggaagtaacggccgcaagcaaggaatatgatttgcttaatgaggcttacagtcctttgggtacaggtggtttattaggcaatgaggtagttaatgcagttgctgaaaactatggtaaatcaccagctcaaatcttgattcgctggtccttacaacatggctttttgccattgccgaagtcagttcatcctaagtatattgcggctaatggtgatgtctttgactttgagattagtccagaagacatgaagaagttagatggtttacgtggggcaagtaagttggctaatgatccggatgaggttaacttttaatttaatttggaataaagaaaattgaattatcacaagaagtatcttatttttgaagtaagatacttttttattaggtgagacaatgaagaaaattacaacaggaattgtagctcacgttgacgcgggcaaaacgactctttctgaggctctgctgtacaaggcaggaaatttgcggacgctaggaagagtagacaatggggatgcttttttagatacagatcaattggagaaaaaacgtggcattaccattttttctcatgaagctaaattaacgactgatgatttagaaattacgttgttggacacaccgggacacgttgatttcagtgcacaaacagaagaaacgctgagtgtacttgattatgctatcttggttatttcaattacagatggtgtaactagttatactcgcactttgtggcatttgctcaagcgatatcaggtaccagtttttatttttgtgaataaggttgatgcgataggcgctgatcgagggatggcgttggttgatattcaaaagaacttaagtgagagttgcgttgatttttcgaagattgatgatgaattttatgaaaatgtggctgccacaggtgatgccttgcttgagaagtatttggatagtggtgccatttatgatcaggacgtgcagaatgcaattgtgcagcggaaagtttttccaatttattttggttctgcgttgaaattaacaggaattacggaatttttggctggttttagtaaatggactaaggaaaaggaattctctgataagtttgcggcacgatgttttaagatctcacatgatgctaagggtgaacgcttaacttggttgcgaattttgggtggcagcttaaaggccaagactgagctagctggtgagaaaattaatcagttgcgtagttataatggtgaaaaatttgcgactattacagaagcagctgctggagaaattgttgctgcaacaggattgactaagacgtatccaggacaaggattcggcgtgggggatgcaccaactgcactgcttaagccagttttgacctataaagttaatccccaggataatgatcttcacgcttgcttaaaagctctgcaaaccttggaagatgaagatccacagctgcatgtgacttggtccgaacatttgcaagaaatccacgtgcaagtgatgggaaagattcaattagaaattttagaacagttaatgcaagaacgttttggtttgaatattgtttttgaacagggaagtattctttatcaagaaacaatcactaaaccaattgaagcagtaggccactttgaaccgctacgtcactacgcggaagttcatcttttactggagccactgccacgtaatagcggtattgtttttgaaaataaatgcagtttagaagttttgactaaaaattggcaacatcaaatcatgacggcattgaagtctaaagaacatcttggtgttttgacagcttcgccgattacagatatgaagattaccttgatcggtggtaaaggctcaattgtacattcggttggtggcgatttccgtgaagcaacttatcgtgcagtgcggcaaggtttaatggaagaaaagatacgccaacaaactattttgctcgaaccgtggtatgattttcgcttagaaataggaaaagatcaggtagggcgtgctttaaatgatattcagcgcatgaatggaaaatttagtacgcctgaaaatattggtgaacgaacagtcatatccggttctgcaccggtagctgaaatgcaagattatgcgacagaagtgcgcaattatacgcatggtgaaggtaatcttgaatgcgtagtcagtggctatttgccttgtcacaatgcggcagaaattattgaggaaaagaattatgatcccgtttctgatctggagaatacgcctaactctgtcttttgttcacatggtgcaggtcacaccgtcacttgggataaggtgccagagactgcacaatatccttatacttatccattagattagcatgataccatgaattgtttatcttgttacatgtgaaacattaaaaatgcggcatagtgcttttcttattaaaaagtgcaacttgaaataagcgaaatatttgactagttatgaaagaaatttcattttattagcaaaatactgctagaaaatcgcttgcatagtaagataaaggtacgatagaaaggtgataaaacatgacacaaataccttttaaagctgtagcggttgatctagatggcacttttttgaccgaaaaaaagacttttgatcatgcgctatttgcaaaagttttacgaaaattgcaagctaatcaaataccgtttatctgtgcaacagggaaccaactaattcgttcgcatgaatattttgacgagtttactaatgaagtagattatgtgtctgaaaatggggcaattctagaagccgatggcaaagtatttaagcggattgcgattgactatgatactgcacaaaaattgttacattttattcaaacagaataccctgaagcaatcattatggttagcgcacagcatcattgctatattttgacgagtatggatcaagcggataaagacgacattagaatttattatcgtgatgttcaggaaatcgatcagtttactgacattgatccagccgatgcgatcttgaaggtttgtctgacagctgatgatgaactggcgcaggtgattcaggatcggtttaatgaaaaatatggtgactgtattcgcggcactagcagtggtaatatgacaatcgacttggtgcataaaggcattaataaggccaagggcgtagacgatatgcttaagcattatggcattgcgcaaaaagatttgattgcctttggcgatggcgaaaatgatattgatatgcttaaggcatgtggctatagctatgcgatgaaaaacgccaatgcgaaggctaaggcggtagcaaagtatgaggcgccaacgaatgatgaaaatggtgttttgaaagttttggctaagtatttagatattgattaatttaatacgcaaaaaagacttgagaagtaattttcccaagtcttttagtttgctttattaactgctctgaaaatattaagtccgctaattagaatgatgaatccacaagctaaaatcagaaccgtttcaccagagctgtctaacaaaattccggcaacaattgaactaatcggtccaccaatagaggtactggtacgaatagtagttagcactctgcctaatatttcatcgtccgcagtaatctgaatcaatgattctgccaaaatattgtgaatactcgtcattagcccaaataagaaaattagtcctgtgaatatcaaccaattgttactgaagaaaattatcaaaagtaatggtactgcactagctatccaagtaaaaccaattgtttttacccgtacggataatcttcctgcaatagttgcacctattacaaagccaatcataaaactgatatagaacatactgtatagtcccgcttgaccattttgttgagcaattcttggcaacagaatggccattgctggcgtcacaaaagaatacaggattgaggaccagaagtaatgacttaagaaataatttgttttaataaacttatagccattaagaatttgattgaggtattttgcctctgcttttttgactttaggtctatctttaatttcttttagggcgtaaaacagaaaaacaaaactgattaggctcagtagactgcagatcaacattacattagctgaaattaaaaaagttaataaaaatccagaaagagcagttcccgttacattcacaagctggtcgatgttgctaactttagaaattagattatttaattcttggtcatcagccgttgtttcttttaaaatagcccggtcagctggattaaaaaattcatcgcagacagatactattcctgcgcagattaatgccaaaatataacttttgctaagttggtaaactgcaattgttgtggcaaataggaaaacagtttgaacaagaattgaatagtaacttgtccttttgaatgaataatgatcgataatggggccgtagaatattgataaggcggcagtggtggaaaagatggcttccgcaattccgacgacaaaggaacttttggtggaagtttgcagccaccagataaagaccatgctgaagagggaattagctagtccgccaacggcacgcgagaaaaaatatgatttcttttttaacattttatttatcctattctcatttttgttttccaattaggatcaatttaataaaaatagtacaaaaaaagacttgagaagtaatttttcccaagtcttttagtttgtcttaatttaggttaattaaaacttgttcttgtccaaagcaactggagaatctggcttttcaccattgatcatcttcaagttgttgtcgaatgccttaacaaccatgttacgtacggcgtgggtggtgtagaaggcggtgtgtggagttaccaaaacgtttggacgatcaattaagtcagctaaacgcttgtctgggaattctttgccttcccaatcttcgttaaatacaccaacttcgtcttcgtaagtatccataacaaagccaaagatcttacctgagtccaaaccgcggataacagcgtcagtgtcaacaagtggaccacgtgagcagtttacaattacaacgccatctttcatcttggcaattgattcgtcattgatcatgtgtacatttgctggaacatctggtacgtgaagtgaaattacatcagcttgcttgtacaagtcgtcaagtgagtcaacgtagtaacccttcttttcgagttctgggttcttgaagatatcgtaagcaatgacctttgcgccgaaaccttccataattctcataaatacttgaccaatgtgaccagtacctacaacaccaacaacttggtcacgaacttcacgaccaatagtaggtgcccaacgtaagtcgcgcttagccatcttttcgtccatacgcttgtcttgacgtaatacacgagcagcttggattgcagcatgttcagcaatagcgtcaggagagtatacaggaacgttagtaatttcaaagccaagttccttagccttgtccatgtcgatgttgtcgacaccaacgttacgtaatgacatcttagttacgccagcgtctgccaatgcttgaagagtttctggggtgtagtctaattgttggtaaacaacaacaccgtcagcacccttagctaacttagcagtttcaggagtcaaaagcttatcagtgtaatctacatcgatatccttgtgagcatccttccattcgtttaagaatggttcttcgtctttacgaatagcgtaagcaaaaatctttgtcataaatttaacctccgtaaaatttattagtatgaccagtcctcattatacgcttttacttgctcaacaaaacacaaaagaaccatttttttgtatagattttaagaaaaataaaagtcaagttttactctgagcaaaaaagttgcaattttttcaaaaaaagtttatagcctaaaaattgcaactattattaactgttacctaatctcaatcccatagatatgaaaattatttttgtatatagcaatattagttaaaggtagtatatggatttgtataagagacgcattttcgttatataacccaggttatataatggactttaagtagagaaacaaacatagcggaggaaaattgaatatgcattttaaaggagaaagccaacagcatttcagcctaagaaagctgacaattggtgttgcttctgtaataatcgggaccacctttatgttttttggtggtcatgctgttcatgcagatgatttaagtagagatgctgagcaaaccagctcagttgttcaaaaacagagtagtgagaaaatagatgtagatgcagtcaaagaagctgataatgtttcaaatcaaagacaagacttacccagacggtactaagagtaccgcaactgttcctgtaactgtcattgcaccaaatgtaccagacgttatctacgtaccaaagggtgacaagtttccagacccaagtactgtagttactaactctaacgatatcaaggacaagattcctgacacgacttacacttggaaaactactccagatactccaaatactaaagtagtaattaactataaggctaataatcctggtactccagataccccagttactccaccagtggatccaggcgataatccagcaaccccagttaccccgcctgtaaagccagagcagaagccaacaacaccaactcctcatgctactaagacaccagcaaaggataatggtggcaagaagacagtagctagtgagcaaaaatctactttgccacaaacggggaagaaggataacgttgctttgactgctatcggtgtagctattgcagctgctggaagcttattaggattagcagatagcaagaagcatagatcttaatttgtaatatctaatttctgtttactaagaagcaagttgactcagataggagctagcttgcttttttgtctaaaagtttaaggatttctaaagacaaaaagcaaatagtgacgcattgtcataaagctgatattatatactcataacaaaaatacaacgcatcaaatagagatgaattgtaagaaggtaacaaatcttctaattccttattaatacatcctattgggcctttattaattcatacattgggtattgctttttgctggttgtcccctatgcaaccgcgaaagttaagattgataataagtccatcccctttttgcgaaggtaaagagtcaagaccccctgcaacatctcttgcgttgaatcttttgttaatcttgataatttatcttcgcaacattagtgatgagtaggctaatgtaaaaaaatctcgttattctcattcaacacaactcccttaaaagggctggtttagaaaagtcatctaaatcagtcctttttctttttttcgttataattaaacttgagaactaaaacaaaggggaagaaaaatgatcttaatttcatggaatatcgattcattaaatgcagctctgactggtacttcagctagggcggaagaaacgcggcaagttttaactaaaattcatgatgccaatccagatattattgcgattcaagaaactaagctgcgtgcaactgggccaactaaaaaacataaagaagtgttggctgaaaagttccctgagtatgactatgtttggcgctcttcagaagaaccagctagaaaaggctatgctggtacaatgtatctttataagaaaggattaactcctgcagtgtctgagccgattattggcgcccctgagccgatggatcatgagggacggataatcacactggaatttgataaatgctttgtcacccaggtttatacgccaaattcaggcagtggtttaaagcgactagctgaacgtcaagtttgggaccaaaagtatattgaatatctgcaaaaattagatgaaaaaaagccagttttagctagtggtgattacaactgtgctcataccgagattgacttgaagcatcccgaaaataatcatcactcagcaggttttactgatgaagaaagagtcgactttaccaatttgctcaatgctggctttaccgatacctttagaaaagttcatggtgagattactggcgtatattcttggtgggctcaacgtgtcagaaccgctaaggctaacaactctggctggagaattgattactggctagtaagcaatcgcattgctgataaggtggtccgctcagagatgatcgatacaggcaaacgagcagaccactgcccaattttgcttgaaataaatctttaaattgaagcaagccctagtataatttctttttgaaatgtttttattttgaaaaagaagtaggggttgaaattctttgaataacgagaaaaaagaagattgggctttggagcaggatctgaagtacaatcgtctgacagcatttaagctattcgcgatgactagttcaatggttatttccgttgatgaactcgcaccatttggtaaaactggagcaacggcactgttttacttgttaattgctggaatcgcttggtttatcccgattacgcaaatggctggagaaatggcctcaattgatggctgggaaaaaggcggaatcttcacttgggtgaaaggatctcttggagacaaaacaggctggacagcaatgttttatcaatggattcatattactgttggtatggatacgatgatgtatgtgatcattggggcattgtctatcacatttgggacaccttggttcaacaccacgccaatcgtacgcttcattttaatgatggttattctgtggggagcaacagcgattcaggtaattggtgttagaaagattggtcgaatcgctgaatggctgtttattctggggattgcgacaccagtaattttattgatcatttcattcttcgtatatgtgattcaggggcatcccttgcatatgacgattaactggaatactgtaattccacataaattgaatggtaatacattagttgcctttgtcccatttatgttggccttttgtggtggggaagcttctgcaccgcacgttaaaaacttggaccacatcaagtcatactcaaaagttatgcttggcttagccgttactgcaatctgcttcgacttgctaggtagtatggcaattggaatgactgtgcctaaggatcaaatagagaacagtacaggctttgtttatacctatggcaagctgttaacgtcaatcgggctacctggtgatctgttgcaaaaaattgtgggtataatgttagcctgcggtattattggtgagctaggcaactggattgctggtcctaatcagggaatgtatgaagcggctaaagagggctatatgcctaagttttttgctaaaaccactaagcacggcgtgccattaagaattatggttttacaatcaagtatcgttaccatttctgcattattgattacttttaccagtggtgccgatgcagattttgcgtttaacgtttcattggccgcaacgacggcgcaatatctcatggtttatatgattatgttgattgcttacatggttttgaaaagaaagcatgaagattatcaccgtatgtattacatgagcaagaaccctaatttgagtattgcaattgcggtgcttgcattaatcatcacggttatagctttctttgtaacttttgttccagcacaaggcacgccaagcaatttgcgtcacgtttatgtttggaccttaatcggcatgtgtgccattgtgtcgattttgccacttattttgtatcgctggcatgaaaaatggcaatcacaatagaattaagaagcattcgtttttcaagacggatgcttttttagtagaatttgagagaggtgaataaaatggcggatgcgatgagggatgcaatattaaatggttttgttgatcaaaattatttaggaagtgaagaattaggtcctaaaatattagctaataatcagcaagagagaatctggcagaatttgcgccaggaattgtatagttgcaagtcctttacttgggcggttgcgtttattacgcaagacatgctagttccgtttaaggtgataatggcagatttagcgaaaaatggaattagtggcacgattattactggtgattacttgggttttaacaatccgcgtgtttttacggaattacaaaagattcctaatttagaagttcgtattgctaataaggcaggtttccatactaaaggatatttatttgatcatgaaaactatcaaactgtgattattggcagtgctaattttacacgttcagctctgctggctaactatgagtgggctttgaaagtaagttcaaaaaagcaagcagatttaacagctcaattagtggataaaattgcagatttgaaacaggatagttttgttttaaattcagcctggctaacagattatcgtaaaaattgggtaaagcctgagcgagttgctactgatcggcatcagacaaaaattttaccaaataaaatgcaaaaagcggctttaaaacagatagaagcactagttacaagtggtgaaaaacgagggctagtagtgtcagccacaggaacggggaaaacttatttaggtgcttttgctgttaagaaatatcagccgcggcgttttttatacattgtgcatcgtgagcaaattgctaaaaagtcattagaaagtttttatcgtgtaatcggtggaccaagatcggattatggcttattaacgggaaataggcacaatttacaggccaagtatttatttgcgacggtacaaacgataagtcaacctgagatgctggctaattttaatagcgatgaatttgattatatcttgattgatgaagcacacagggcagctgcaccttcatatcagcgccttttacattattttaagcccaatttttggttaggaatgacggctacgcctgaacgaatggatgagcaaaatgtttaccagatttttgactacaatttggcatatgaaattcgtttgcgggatgcactggaagagaagatgctggcgccatttcattatgtgggtgtccaggattatgaagcagacggagtagtgattgatgaaacaacagatttacgctacctagcttctacatctcgagtagactatgttttaaaggaattagactattacggctattgtggaacaaaggctaaaggcttggttttctgcagtcgacaggatgaagcacgtgaattagctcggctttttagtcaaaaaggacatcccgctgtagcattgaccaatgaggataatgaaaaaagacgtaatgaagtggttgcgtctttagttaaaggtgagattgagtatattgtagcggttgacttgtttaacgaaggaatcgacatccctgccttgaatcaaattgtgatgttacgcaacacacagtcgagcatagtgtttatccagcagttaggccgggggcttcgtaaatatcctggcaaagattttaccgttgtgctagattttatcggcaattataaaaacaattacatgattccgttggcactgaatcaggatacttctcgaagcaaagatcaagctaaacgagaaacgcgtctgccaagctttattgatgtttcaacgattaactttagtaaaattgccagtgaaaaaattttggcttcgcttgatagtgtcaagcttgatgggatgcgtgaattgcggcagagttaccatgatctcaagaacaaactagggcgtgtaccgctactatttgatttttatcaatatggctcagttgcaccgattgtttttgcacaaaatcatggcttggcaagctatgctgactttttgggtaaaatgggcgaagacgttaatttatcaaaatatgaaaatgaagtgctgtcttttgtgactaaggaattacttaatggtaaaagaattcacgagttacttttgttagagatgctacttgaacaagatattgttaagcaagaagattatctagctcaattgaaacgacaccatgcttatgtaaatgatgaattgttagcttctgttgatgcgattttatcgctagatttttttgatattaagcagggaaagactaccaaaaaagcacaatatggtaaattgccgttagttgaacgtagcaatttatttgactatcaattgaatggttctctacgctctgccctagatcaacatgattttaagaatttatttgttgatgctattaaaactggtttggccttaaatcaggaatatgataatcagcgtcaatttactttatatcagcaatatgatcgtaaggacgcttgtcgactcttgaactggcctaaggatgtttcggccccgatgtatggctatcgtgttggtgagcaggacacaccaatcttcatcacttatcataaagatgatcatgaaaagcggaatgctctgtatcgtaatacattggctgatgggcgcagtttgcgctggtatactcgggtaccacggcatttagattctgatgaggtacagcgtttgcttaatacgcgagggatgaatttgcatatatttgttaaaagaagcgatgcagatggtaagcagttcttttatttaggcaaggcaaagattcaagctgattctgttcgcgaagaattgctcggtgttaagaaaaagccagctgtagggatgaacttaatgttgaaacatccactgagtgagtcaatgcatgagttattatttgaatagaccaaaaaagcctttccgcttaggaaaagcttttttaattgccgctaatattaattagatcttggtcatcttggttattatccttatcaaacattctaggcttgatgtgatctagaatcttagtcccgatatttttctgagcagtttcatcaccgctaacctggtttaaaaacataattattccatatcgattatctgtagtcattttgatccaattaccaaaatgagtgttgcttaagctaccataagcagatttagtatggtcatcatctaaatgaagccctccagaataattagtggttgcacttttaagatgagttaagtaatagaaatcggatttgcttaagatactaccattggttaagccaagctggatcttgtaataatccattggggtagtgaacatattgcctgcgcctggaagctgggaggcaagagtctttttaacgtattcagcgtcttggtaatttttaccattattccagacgtaagagataggatcggttttccaactaggaatatcctgataaaggaatgtattagcaagccctaatttgttaatgatgcgattattgaaattgttttcgtaggattgtccgctgattttaataataattccggctaataaaagatagttggtattattgtagaagtaggttcctggtgtcccttgagtgccgttattagtattatcaatagcccaattgatggcgtcattctcacttaaaacttttccgcgatccaattcagtattggttgcttgaatgccagaagtatgggtcattaactgtccaatagtaatattatcggcgtttttaagattagggtaccaacgtgaaattttggtgttttgcgtaaatttttgactagtgtgccagttttcattcatcagctgaattatcattgctgctgtaacaactttttgcaaagaagcagttggataaactacgttgtcgttcccattaccaacttttttaccgtaccaagcgtagccatagctgatttgttgcggctgaccgtttttgataatgacgatactaccgcgagtattgttttgagccaaagtattgcggacaaaatttcgcatttcggttttaaagtatgaactggcttgaacttgtggtggttcagtgatcgcaaatgcaggaactgtcgttagcagcgcagcggtagctagtccaataattgattttttcaaaaattaaaaggcctcccttaaaaagtggtttgtttacattttagcgcgttctttgcatcggacaaactattatcttggtgaaaagacgtatttttagctagcttgttgaaaaagtgcggctaattttgctctgagtgcgggatcatgagcgtataaataggtaccgcggattcctcgcttgaatagaacgttgagtgaattcatgaccatcttctcttcatattctattttttcttttgagttggttagatcattacgctttttgaacatctcaacatctgtaattttgtctaaattaactttaagttgattggtgcggggaatcaggctgattggtggaccgataatgatgccagcataatttaggtcaaaaccttggcaagtatagatagaaccaacttcattgattgttgtaggaatttctgcccaaggagttgatgtgtagttgtattgatcccatggcagcataaatttcccttctttaatgtaatgtttgccaccatcaagagtagatggatagccggaagttgaaagaattcttgccaggccgtctgtttgatttctcttgacgatttcttgccgcattttttctgcatcagtaaaaatacgaaagtcgtagttgtgccacatttctttttttaagggcattaatttattatgtgtaaaaaagttaaaccattctattagactatctggtgccatcattctaaattgatgatgtagttgatagtcttcgtggggataatgatgagtaattgcttcaagtcgcttacgtgtccagaagcttttcattcgtaaaacttggttttcatcaaataccaaaatgataacttttgaccgcttaataacctcctctaattggttatcgtgataaaagttgttgtagtgatcaggctgagataagagcaagtgtgcttcatcaatgacgacaacatcagcactggtttgttttttgtccatctgattaataaatgaagttggccgcatataatttttcttatatagttctttaatcggcccagcaatctgcttatagacttttagcagttcagggtgatttactaaaaagtagttttgagttttatacagttggctgcctgtttggtggtttaatttttgcaactgatcaaaaagggcagaaagcactacacttttaccagtacctgcttcaccataaatagtgaaaacagcaggatgatttttattgctgcaatgtgtaatcgaaaaatgtaaaattttttgtacgagaagtgattgctcttggttgagctgatggtaaggagagagtttaaaacttgcttgattattcaatatttattcacctcgttttcaattataatgaatagaaataataatgataaaggaagaaaacatgactgcacaaaaaataattcacaatcggctatttttaagacaaaaatctgatttagctggcaaaaatgatttacaagttgcgataaacttgcgtgatacgctactagctaatcgtgggaaagctgcggggctggctgcaaatatgattggtcagactaaacaaattattgcgttttatgctggcccgcttccatttgtaatgctgaatccgcgtattattcaaaaaaagcagatgtatcttgctagtgagggatgtctgtcactagaaggcgagcgtaatgttcagcgctatgaagaaattactgttacttatcagaatatggagttagaaacagtaacgcaaacttttggtgactttatagctgaaacgattcagcatgaaattgatcattgcaatggaattctgatttgaatagtagaatatttacgtgattttgcaaaaaaagtaaaaaaatttaaattaattttgcatggtttcagggatgaaaacccacaattttcgaataattagatttgatagaataaaatactttttaatttaatgcaaagataaagaaaaatatattacaacactacctagtgtatcgtgaagaacccgaacaaagagcaagacttgccaaagcggagaaaataaggtaaattaataaagtcgcttcgagagatgcgacgagagcttaaaaacagacatgcaaggaaagaaaacaaataaaaagaaaaaagtacttgcaaagaagtaaataagctggtaatatatttaaatgtcgtcaggtgaaagcagaaaaagcttgagcaagacaaaaaaacaaatcaaaaaagttcttgacaaagaaatgatggtttgataaaatatgaaagctgtctgctttgcaaaaaagcaagacagaggtagtactttgaaaactgaacaaagtttcgctaaaagtgtgcgggtgtaaaaacccaaacaagaagcgaagtcaattcgcaagcaataaatttgagacaaagatcttaaataaggaatgagcaatcattcaaactttttaaaatgagagtttgatcctggctcaggacgaacgctggcggcgtgcctaatacatgcaagtcgagcgagcgaaactaacagatttacttcggtaatgacgttaggaaagcgagcggcggatgggtgagtaacacgtggggaacctgccccatagtctgggataccacttggaaacaggtgctaataccggataagaaagcagatcgcatgatcagcttttaaaaggcggcgtaagctgtcgctatgggatggccccgcggtgcattagctagttggtaaggtaaaggcttaccaaggcgatgatgcatagccgagttgagagactgatcggccacattgggactgagacacggcccaaactcctacgggaggcagcagtagggaatcttccacaatggacgcaagtctgatggagcaacgccgcgtgagtgaagaaggttttcggatcgtaaagctctgttgttggtgaagaaggatagaggtagtaactggcctttatttgacggtaatcaaccagaaagtcacggctaactacgtgccagcagccgcggtaatacgtaggtggcaagcgttgtccggatttattgggcgtaaagcgagcgcaggcggaagaataagtctgatgtgaaagccctcggcttaaccgaggaactgcatcggaaactgtttttcttgagtgcagaagaggagagtggaactccatgtgtagcggtggaatgcgtagatatatggaagaacaccagtggcgaaggcggctctctggtctgcaactgacgctgaggctcgaaagcatgggtagcgaacaggattagataccctggtagtccatgccgtaaacgatgagtgctaagtgttgggaggtttccgcctctcagtgctgcagctaacgcattaagcactccgcctggggagtacgaccgcaaggttgaaactcaaaggaattgacgggggcccgcacaagcggtggagcatgtggtttaattcgaagcaacgcgaagaaccttaccaggtcttgacatctagtgccatttgtagagatacaaagttcccttcggggacgctaagacaggtggtgcatggctgtcgtcagctcgtgtcgtgagatgttgggttaagtcccgcaacgagcgcaacccttgttattagttgccagcattaagttgggcactctaatgagactgccggtgacaaaccggaggaaggtggggatgacgtcaagtcatcatgccccttatgacctgggctacacacgtgctacaatgggcagtacaacgagaagcgagcctgcgaaggcaagcgaatctctgaaagctgttctcagttcggactgcagtctgcaactcgactgcacgaagctggaatcgctagtaatcgcggatcagcacgccgcggtgaatacgttcccgggccttgtacacaccgcccgtcacaccatgggagtctgcaatgcccaaagccggtggcctaaccttcgggaaggagccgtctaaggcagggcagatgactggggtgaagtcgtaacaaggtagccgtaggagaacctgcggctggatcacctcctttctaaggaagcgaaggatatggagagcaggaatgctaagagaagtatccagagcaagcggaagcacactgagaaactttgtttagttttgagggtagtacctcaaaaagagctagtacattgaaaactgaatataatccaagcaaaaaaccaagacaatcaaagagaacagattgtagagcgaccgagaagagaattcttgagtaaggtcaagtagaaaagggcgcacggtgaatgcctaggcactaacagccgaagaaggacgtgacgaactacgaaaagcttcggggagcggtaagtacgcagtgatccggagatatccgaatgggggaacccaatgcagagatgcattattgattagtgaatagatagctaatcaaaggaagacgcagtgaactgaaacatctaagtagctgcaggaagagaaagaaagatcgatttccttagtagcggcgagcgaagaggaaagagcccaaaccaagtgatttatcatttggggttgtaggactgcgacgtggcagtgtaagagatagttgaattatctgggaaggtaagccagagagggtgagagccccgtaagcgaaatctcaagcacgcctagcagaatcctgagtaggccgggacacgaggaatcccggttgaaaccgcgaggaccatctcgcaaggctaaatactagttagtgaccgatagtgaaccagtaccgtgagggaaaggtgaaaagaaccccggaaggggagtgaaaaagaacctgaaaccgtgtgtctacaagtagtcaaagcacattaaagtgcaatggcgtgccttttgtagaatgaaccggcgagttacgttatctagcgaggttaagtcagaaaagacggagccggagcgaaagcgagtcttaatagggcgaaaagttaggtgacgtagacccgaaaccaagtgacctacccatgaccaggctgaaggtgtggtaaaacgcactggagggccgaacccacgtaagttaaaaattgcggggatgagttgtgggtagcggtgaaattccaaacgaacttggagatagctggttctctccgaaatagctttagggctagcctcgtggagaggataatggaggtagagctctgtttggactaggggcccgtcaggggttactgaatccagataaactacgaattccagatatccatacacgggagtcagactgcgagtgataagatccgtagtcgaaagggaaacagcccagatcaccagttaaggtcccgaaatctatgctaagtggaaaaggatgtggagttgcgtagacaactaggacgttggctcagaagcagccatcattcaaagagtgcgtaatagctcactagtcgagtggcgctgcgccgaaaatttaccggggctaagcatagtaccgaaactgtggatgtgttttaaagagcacgtggtaggagagcgttctaagagcggagaagttgaatcgagaggatcaatggagcgcttagaagtgagaatgccggtatgagtagcgaaagataggtgagaatcctatccgccgaaagactaaggtttcctggggcaggctcgtccgcccagggtaagtcgggacctaaggcaaggccgagaggcgtagtcgatggataacaggtagagattcctgtactgtgtcaaatcgttaagagcgaaggagggacgcaggaggtgaagcacgcatcgcgatggaacgatgttcaagcaacaagtgcggttaagagtcaaatgcttctaaccagcaacacgagttgtgaagaggagtgaattaaaagtagcgaaggtgtggtaatcacactgccaagaaaagcttctagccagagatgacatacccgtaccgcaaaccgacacaggtagtcgagtggagaacactaaggtgagcgagagaactctcgttaaggaactcggcaaaatgaccccgtaacttcggaagaaggggtgctagccaagagattggttagccgcagtgaataggcccaaacaactgtttatcaaaaacacaggtctctgcaaaatcgtaagatgacgtatagaggctgacacctgcccggtgctggaaggttaagaggagagcttagcgtaagcgaaggtttgaattgaagccccagtaaacggcggccgtaactataacggtcctaaggtagcgaaattccttgtcgggtaagttccgacctgcacgaaaggtgtaatgatttgggcactgtctcaacgagagactcggtgaaattataatacccgtgaagatgcgggttacccgcgacaggacggaaagaccccatggagctttactgtagcttgatattgagtatcttttaaacatgtacaggataggtaggagccagagaagataggacgctagtcttattggaggcaatgttgggatactacccttgtttgaaggatgctctaacctcgacctgtaagccaggccagggacagtgtcaggtgggcagtttgactggggcggtcgcctcctaaagtgtaacggaggcgctcaaaggttccctcagaatggttggaaatcattcgcagagtgtaaaggtataagggagcttgactgcgagagagacaactcgagcaggtaggaaactaggacttagtgatctggtggtaccgtatggaagggccatcactcaacggataaaagctaccctggggataacaggcttatctcccccaagagttcacatcgacggggaggtttggcacctcgatgtcggctcgtcgcatcctggggctgaagtcggtcccaagggttgggctgttcgcccattaaagcggcacgcgagctgggttcagaacgtcgtgagacagttcggtccctatccgtcgtgggcgtaggaaatttgagaggagctgtccttagtacgagaggaccgggatggacgcaccgctggtgtaccagttgttccgccaggagcatcgctgggtagctatgtgcggaaaggataagcgctgaaagcatctaagtgcgaagcccccctcaagatgagatttcctttgcgtaagcagtaagacacctcagagacgatgaggtagataggctgggagtggaagtcctgtgaaggatggagcggaccagtactaatcagtcgaggacttgaccaaagcgaagcaaactggaaggttttttgcgagaaggattatgtttagttttgagtgtaaaagctcaaaagagtacggtggcgaaagcaagaaggatacacctgttcccatgccgaacacagaagttaagcttcttaacgccgaaagtagttggtgggcaactgcctgcgaggaaaggaagctgccgtgctcttttttaatattccggcttagctcagttggtagagcgcttgactgttaatcaagatgtcgtcagttcgagtctgacagccggagtaaagggaagaaggaagcggaaggcttcctttttttgtgccttttgggtatgttaaaaggttaattaggctaagcaagcatgacttgagggtcaaatttaatataatcattaatagaagacatagtaaaattcctaacaagcttaattgaattgattacggaggctatgctctctttttaagtgcataaaaatcttatagatagatacgcgtggtgctagttaaatcgttctagacaataagccaaattataagctaaaattgcaatttccaaccggctttgaaagcctatcagactacgtgctcgattgttctcggcattgtaataggtcagaagcgaaaagtcgctttcaattgttctgcgaatagccatcaattgatgatcattgtgctttttagctcctgtcatatttttacgatatggtgtccaaagttcgtaacccatttgttttagctgttgatgcagttctttgcctaaatagccttcgtcgccaagaagatagtaattagatggatgggtattttctatcagttcaactgtctccctggcatcatgaactgatgcctttgttacgacataatcaagaatgtaaccgtcatcgctaacaatggcatgaactttgaaaccatagaagtaaattttcttggtggccttataaccaatgtgggcataaccgcgaaaaattttagcacgatagtttcgaattggttggcaaacaggtaccggaaagctgtcaatgatcaagaactgtccattcaggtcaacctttttattcatttcttgccgtatctgataaatcaattgcaatagctgacgtgaacgccgattaaaacgtgagtgtgataaacaattgaaacattcacagaatcttctttgtgattcaattcctgtcttagcttgccagataagtaaagccaaaatcagactgtccgtagttttaatttgatcaatatttcgccgatgagtaaactcagccggtgcatacaaacgataccagtgccgacaaattatcactaaatctttaaaactaacttgtaaatggtggctaaaacgcttaagcttaaggcagttcaatcagatcagactcttttctattattactatttacaagtcgagtctaacaagattggacttttttattaactaaaacgatttaactagcaccacgcgtagatagattattataaatacgcgtggtgctagttaaatcgttctaggcaatatgccatattataagctaaaatggctatttctagccgctgctgaaaaccagctaagcaaagaaaagtcgctctcaattgttcttctaattgccatcagttgatgatcgttatgctttttagcgcctttcatgtttcttcgatatggtgtccaaaggacatagcccataccttttaactcggcagttaagtcttttcctaagtagccttcatcgcctaaaagataatggttaattggatgagcattaatcatcaattctgtcgtttctttggcatcatgcactgatgctttagttcaagtacatagccatcatcgcttactagcgcgtgaaccttgaagccgtaataatagatttttttagtggctttctagccgatatcagctatgccacgaaagatcttgacgcgatagttgcggataggctgacaaactgggaaactgtcaataattaagaattctccagctgtttttacttcttgattccaatcttgacggatacagcgcattaaaggcaaaagcattcgtgcccgacgattaaagcgagaatgagacaaaccgacaaagaatttacaaaatcttctttgagattcgataccaatttcagtttgccaaataagcatcgctaagatggagctgtcagaaattttaacctgatcaacatttttacggtgcttcaattcatcaggagcacaaagcttgtacaaagaacgacaaattacatttaaccgagcaaagctaacttgtaaatggtgagaaaaacgattaagcttgagatagttcaattagatcggactcttttctatttaatttaagttacaacttgagtctaatccgattggacttttttattaactagcaccacgcgtttataaatattcaacgacagtaaaattaggtaagcaatctatatctaggaatctgttggggttctgattgtagtaggctaattatacaaaaatgagttaacaaaattctgatcagaattagtacggttaagattgaaaaaatagctggtaattattactgtatctctttgtaattaggtagcaatgctattttttacttctaaaatataattaaaccggtcagacaattcgtattgatctgaatttggataaacagttataacaaaactatgtgtgcaaagcagatgacagggacttttaattgatctcgtatgttggagcgcgctgtgttgactatttgttctaagtgaacagatgataagtatgcctctatctaagtaccaagatctaggaaattcattctgaagtagttaatatgtgtcaatatgtcgcacaaaggtaactatgaattacagcaacataagagaaatttgaaaaatagtttttaaattgtggcttgttattagtgaaaatgataaattaaatattattttggcagaaaatacagcttaataacaaaaaataaaaatattttttgcttacctttaaaaatatagttcgagatttataaagtttttaacgagttaaagtgatatttctataattgaaagcagattctactaatgtaattactataatcagaataaatatttcataaaaatacatagaacccgaacgaagagcaagacttgccaaagcggagaaaataaggtaaattaataaagtcgcttcgagagatgcgacgagagcttaaaaacagacatgcaaggaaagaaaacaaataaaaagaaaaaagtacttgcaaagaagtaaataagctggtaatatatttaaatgtcgtcaggtgaaagcagaaaaagcttgagtaagacgaaaaaacaaatcaaaaaagttcttgacaaagaaatgatggtttgataaaatataaaagctgtctgctttgcaaaaaagcaagacagaggtagtactttgaaaactgaacaaagtttcgctaaaagtgtgcgggtgtaaaaacccaaacaagaagcgaagtcaattcgcaagcaataaatttgagacaaagatcttaaataaggaatgagcaatcattcaaactttttaaaatgagagtttgatcctggctcaggacgaacgctggcggcgtgcctaatacatgcaagtcgagcgagcggaactaacagatttacttcggtaatgacgttaggaaagcgagcggcggatgggtgagtaacacgtggggaacctgccccatagtctgggataccacttggaaacaggtgctaataccggataagaaagcagatcgcatgatcagcttttaaaaggcggcgtaagctgtcgctatgggatggccccgcggtgcattagctagttggtaaggtaaaggcttaccaaggcgatgatgcatagccgagttgagagactgatcggccacattgggactgagacacggcccaaactcctacgggaggcagcagtagggaatcttccacaatggacgcaagtctgatggagcaacgccgcgtgagtgaagaaggttttcggatcgtaaagctctgttgttggtgaagaaggatagaggtagtaactggcctttatttgacggtaatcaaccagaaagtcacggctaactacgtgccagcagccgcggtaatacgtaggtggcaagcgttgtccggatttattgggcgtaaagcgagcgcaggcggaagaataagtctgatgtgaaagccctcggcttaaccgaggaactgcatcggaaactgtttttcttgagtgcagaagaggagagtggaactccatgtgtagcggtggaatgcgtagatatatggaagaacaccagtggcgaaggcggctctctggtctgcaactgacgctgaggctcgaaagcatgggtagcgaacaggattagataccctggtagtccatgccgtaaacgatgagtgctaagtgttgggaggtttccgcctctcagtgctgcagctaacgcattaagcactccgcctggggagtacgaccgcaaggttgaaactcaaaggaattgacgggggcccgcacaagcggtggagcatgtggtttaattcgaagcaacgcgaagaaccttaccaggtcttgacatctagtgccatttgtagagatacaaagttcccttcggggacgctaagacaggtggtgcatggctgtcgtcagctcgtgtcgtgagatgttgggttaagtcccgcaacgagcgcaacccttgttattagttgccagcattaagttgggcactctaatgagactgccggtgacaaaccggaggaaggtggggatgacgtcaagtcatcatgccccttatgacctgggctacacacgtgctacaatgggcagtacaacgagaagcgagcctgcgaaggcaagcgaatctctgaaagctgttctcagttcggactgcagtctgcaactcgactgcacgaagctggaatcgctagtaatcgcggatcagcacgccgcggtgaatacgttcccgggccttgtacacaccgcccgtcacaccatgggagtctgcaatgcccaaagccggtggcctaaccttcgggaaggagccgtctaaggcagggcagatgactggggtgaagtcgtaacaaggtagccgtaggagaacctgcggctggatcacctcctttctaaggaagcgaaggatatggagagcaggaatgctaagagaagtatccagagcaagcggaagcacactgagaaactttgtttagttttgagggtagtacctcaaagattggaaaaacgccaagcgttagtcgggcctatagctcagctggtttagagcgcacgcctgataagcgtgaggtcgatggttcaagtccatttaggcccattgacataacgaagaaaaagagttaaagttatgtctggccgaaaataaaatactctgggggcttagctcagttgggagagcacctgctttgcacgcaggaggtcatcggttcgaacccgttagcctccattgatccagaaaaaggatcaaagagctagtacattgaaaactgaatataatccaagcaaaaaaccgagacaatcaaagagaacagattgtagagcgaccgagaagagaattcttgagtaaggtcaagtagaaaagggcgcacggtgaatgcctaggcactaacagccgaagaaggacgtgacgaactacgaaaagcttcggggagcggtaagtacgcagtgatccggagatatccgaatgggggaacccaatgcagagatgcattattgattagtgaatagatagctaatcaaaggaagacgcagtgaactgaaacatctaagtagctgcaggaagagaaagaaagatcgatttccttagtagcggcgagcgaagaggaaagagcccaaaccaagtgatttatcatttggggttgtaggactgcgacgtggcagtgtaagagatagttgaattatctgggaaggtaagccagagagggtgagagccccgtaagcgaaatctcaagcacgcctagcagaatcctgagtaggccgggacacgaggaatcccggttgaaaccgcgaggaccatctcgcaaggctaaatactagttagtgaccgatagtgaaccagtaccgtgagggaaaggtgaaaagaaccccggaaggggagtgaaaaagaacctgaaaccgtgtgtctacaagtagtcaaagcacattaaagtgcaatggcgtgccttttgtagaatgaaccggcgagttacgttatctagcgaggttaagtcagaaaagacggagccggagcgaaagcgagtcttaatagggcgaaaagttaggtgacgtagacccgaaaccaagtgacctacccatgaccaggctgaaggtgtggtaaaacgcactggagggccgaacccacgtaagttaaaaattgcggggatgagttgtgggtagcggtgaaattccaaacgaacttggagatagctggttctctccgaaatagctttagggctagcctcgtggagaggataatggaggtagagctctgtttggactaggggcccgtcaggggttactgaatccagataaactacgaattccagatatccatacacgggagtcagactgcgagtgataagatccgtagtcgaaagggaaacagcccagatcaccagttaaggtcccgaaatctatgctaagtggaaaaggatgtggagttgcgtagacaactaggacgttggctcagaagcagccatcattcaaagagtgcgtaatagctcactagtcgagtggcgctgcgccgaaaatttaccggggctaagcatagtaccgaaactgtggatgtgttttaaagagcacgtggtaggagagcgttctaagagcggagaagttgaatcgagaggatcaatggagcgcttagaagtgagaatgccggtatgagtagcgaaagataggtgagaatcctatccgccgaaagactaaggtttcctggggcaggctcgtccgcccagggtaagtcgggacctaaggcaaggccgagaggcgtagtcgatggataacaggtagagattcctgtactgtgtcaaatcgttaagagcgaaggagggacgcaggaggtgaagcacgcatcgcgatggaacgatgttcaagcaacaagtgcggttaagagtcaaatgcttctaaccagcaacacgagttgtgaagaggagtgaattaaaagtagcgaaggtgtggtaatcacactgccaagaaaagcttctagccagagatgacatacccgtaccgcaaaccgacacaggtagtcgagtggagaacactaaggtgagcgagagaactctcgttaaggaactcggcaaaatgaccccgtaacttcggaagaaggggtgctagccaagagattggttagccgcagtgaataggcccaaacaactgtttatcaaaaacacaggtctctgcaaaatcgtaagatgacgtatagaggctgacacctgcccggtgctggaaggttaagaggagagcttagcgtaagcgaaggtttgaattgaagccccagtaaacggcggccgtaactataacggtcctaaggtagcgaaattccttgtcgggtaagttccgacctgcacgaaaggtgtaatgatttgggcactgtctcaacgagagactcggtgaaattataatacccgtgaagatgcgggttacccgcgacaggacggaaagaccccatggagctttactgtagcttgatattgagtatcttttaaacatgtacaggataggtaggagccagagaagataggacgctagtcttattggaggcaatgttgggatactacccttgtttgaaggatgctctaacctcgacctgtaagccaggccagggacagtgtcaggtgggcagtttgactggggcggtcgcctcctaaagtgtaacggaggcgctcaaaggttccctcagaatggttggaaatcattcgcagagtgtaaaggtataagggagcttgactgcgagagagacaactcgagcaggtaggaaactaggacttagtgatctggtggtaccgtatggaagggccatcactcaacggataaaagctaccctggggataacaggcttatctcccccaagagttcacatcgacggggaggtttggcacctcgatgtcggctcgtcgcatcctggggctgaagtcggtcccaagggttgggctgttcgcccattaaagcggcacgcgagctgggttcagaacgtcgtgagacagttcggtccctatccgtcgtgggcgtaggaaatttgagaggagctgtccttagtacgagaggaccgggatggacgcaccgctggtgtaccagttgttccgccaggagcatcgctgggtagctatgtgcggaagggataagcgctgaaagcatctaagtgcgaagcccccctcaagatgagatttcctttgcgtaagcagtaagacacctcagagacgatgaggtagataggctgggagtggaagtcctgtgaaggatggagcggaccagtactaatcagtcgaggacttgaccaaagcgaagcaaactggaaggttttttgtgagaaggattatgtttagttttgagtgtaaaagctcaaaagagtacggtggcgaaagcaagaaggatacacctgttcccatgccgaacacagaagttaagcttcttaacgccgaaagtagttggtgggcaactgcctgcgaggaaaggaagctgccgtgctcttttttaatattccggcttagctcagttggtagagcgcttgactgttaatcaagatgtcgtcagttcgagtctgacagccggagctagcggaatatgaaagaggcgggggccagaggcttccgcctttttgtgtgctattaaagttctataattaagcttttctaagtcttgaaatttttttaaatagggtttccaaggaactttgaggagtttgtactctgaatggtattgatggatacgttattttttctgccggaaagccacagaatggacaagtgggctgctttaaaagggcttcgtagactttgtattgcactccattgaagaatttatagaaattgttgtaaaaaacgatatttttatctttaatatcgagatcaaatttaatacaatcattaacagaggacatagcacaactcctaaatagcttaattgagacagaatatcataaatattcatcaacaggaaaaattatagagctaataaagaagttatagctttttatttgcgttatgaaatgtataaacttgttgtctttgtctctctattagactggtaaatattcaaaagtatatgttaaatttcagacattaaatacttagaaaaaaggacatatttagatggataaaaattctgatagacttacgttagtgccatatttcccgaatgaaaagcagactcttaaatggtaccaggatcctaaaatctgtaagcaggtagataatattgataccgtttatgatttaactaaattacgtcgaatgtatgaatatttgtcagtgcatgggtggtgctactatattcaatatcaagggaaattgattggtgattgtactttgctaaaagacggtgagatatcaatcgtgatttgcaaagaatatcaaaacttgcatcttggtagaaaatgtgtcgacaaattggtgcagcttgcaagaattcagaaaatgacgcaagtgaaggctcacatatatgactttaatattcaaagcaaaaaaatgtttacaagaatggggtttaaagagcaacaacctgactggtactcttatgatttatagatcaaaaatattcatgttaccaagtaattcatacaaacaatcagttggtgtgatgtcagataagcactcgtattagaaaaatgtaatcatcagtaattaaagactgtagttgaatcaaataattaactcagcgtataaaatgctgagttagacaaaaaaacaacgagcaattctctcgttgttttatggattcattttgatcaaatttttagtttatctttagttgtaaataccaacttgattaatgtgggccaattccagaactggagattgagcgaggtccaaactaacatcacagccagcatggataccattattttcgccattaagccagtgggtattattagttacgtcatagacagtaccattaaatgcaatataagctggacgtccatttttaccattgtaatttgatagagtttctttagtaaattttctcatataagaagctcctttctaataagatcttgatatattaatggtaacactttgtcaccttatagcaagagatacgaaggagtcttatgcttttcttatgaaagatgaccacgccacccagcaatatcccaatctagaaagtcataattaagctttttaccataaattttctcgtaggcagcaactttttgtcggtagtcgagttccatcatcttatgagcgttttcgttggcgtttagagaaacgtcagggaagattggtggtaaaacatggacaatatatttggtctcataaaaattaggatctttcttttcgattttaggtagatccttaatctcgacaaaagtggagactaccggtacattttgtttagccgcaaaataataggcaccacgttgtaatttgcgaggcttgcgataattccaccacatctcctgttctggataaattaaaacccaattatttttagctaaagctgcactgaggtgcttaggaaattcatttccaatatagctaggactctgaactagtggaatagtgccaacataattcattaaatagcggaaaaatcccggtagcattaggttagtatcttcaattacaattgaaagctgatggtgcatcttgttagcgagcagcttcattggtaaagaatcaacctgattgtagtggttagaagttaaaattgcgccaccaataggtaaattatttaggttctctaaacctacaaattcagttgatccagctaatgctctggataaagtaccaaataagagatgtccaatacgattattaagcttacttgaaaaagtgttacgcttattccaataatcattgaccaatttaaggcgctgatctagggacatttggggatcgccgatttctacttttgctgtgaagttacgttcattagcagctttttttatatttttaatcactgcctcacgattatcgccaaaaatcatagtgttactgcctctcgtttcttaacttttgcccaattattaggatcttgctcagttttgtcttccttagcaagcatatgatccaatttttcgcggtctgctgcacgctcgtcatcagtataattattgagttcgttctttaattcatcgaaaaactgcgtttgtttggcactatcccagaagtactgtgcatattggacattagcaaaatgccatggcttaaagaaaagattatagtgaatcagaccaggattagttaaaggttcagtgttttcatttggcatagcatcccagcgaggatttaagtgcaaaattctgccttccccgatttcatttaaatagtcttgatcaggagcaatacaatcaaaatgatacttttctaaaagtgtcataaaatggtcaataaaatgttcagcgcgaaaggccctagcattcatgacgagcatgccagagttaatgtatttcttggggtcaagtgccaggacatttttgatgtattttatcatcttgtctacatattgaattgaggagtcggtgcaagcagcaaataaattatcacccaattcggagttgtatagtttagcaagatcgtcgtttacaattgtgtcgctatcaatatagatcaccttatcatattcgggaaaaagttctggaataaagaggcgataaaaaatcgacatggtaaaaaagtcagcgcgaagaaagttttccttacgattttgaataggttgtacaagttgatcatcaatatggaaaaacttcacatgaacgtttgaactgctaagatcagacaaagctttttgatgctttgatgagagatcttgatttaaaaagtaaacagtataatccttatttggatctgtatgtttgactaaagaattaagagaaacagcagcgtatttggtaaagtcatcgctgatactgtaaaaaataggaattgtcataaaattacctttcttagattttaactgattccgtttgtttaaccttagcccaggtatttggctctttgacaatcatgtcaacttttttggccatccattctaggttagctcgggccttttgacggtcttcatcagtaaagttgtctaattgctgctttagttcatcgtaatacggcgtagttttagcaacataccagaaataatgaccatattgaacatcagcaaaatgccatggtttgaagaaaagattgtagtgcacgatcttaggatcttgaatttcaggaatgctttcatttggcatagcatcccattctttaggtaggtgataaatcttatcttcgcaaatttcattcatgtaggcttgatcagggtcaacgttatcgaaatgatatttattcattaagtaatagaatttatcaacaaactttttgtctctaaaggccttcatattaaacagaattacaccattattgatgtatttttctgcaggaaaaattccctgacattctttaatgtacttttgtaaaagtggcatgtaacgaattgataagtcgggacatgaagcaaacatgttgtcggcgatatcaatttcatacattttagcaatatcagtacagataatagtatctgcatcaagataaactgccttgtcatattgagggaacaattctggaatgaatagtcggtaaaaaattgacatagtaaagaattgagcacgcaagtagttttccttagtattgtgaattggcttaaccatgtcatcgtcaatatgaaagatttgaacatgaatattatcagttgaaagatcttctaagctctttttgtgctcatcagatatctgttggactaaaagggtaatcgtatagtccttcttggggtcagtatggtcaattaatgatttaattgaaacatatgcatatggcgtataattatcgctaattgtgtaaaaaacaggaatggttttcaaaataagatcctcctaaattatttttttaaattatttcgtaatttgagatattcgttaagcaaatcatcatattcatgtaaatgaagtacactgtgtacgcgatcaacatcccatggcttaactgtttgagtatggaaataaggccaaaacctaaagctagtagtgaaatgttgaattttggtgtttttttgcaaatgatattgctcattataacggcgtggtgctactcgcttggctacagctagcttgtttattgctgattggtcgggcaaaaacatttgcttaacctgcatcatatgccgcacctcggcaaagagatcagtttgcttaattttcttcatattcagcaacaaaacgccagaattaagataatcaaatgcgcgcttggtcttaagattgtggaagaagaagcggccccaataatcaagtacgcccactaattcgattccggtaatatcctcattgtaaaaagttgtaatatcaccgcgaatgacaatgtcatcgtctaaataaagaatgcgatcaggaatctgtggcaattggtctgcaaataaacgcaacatagcatatggcgtgaagcgagtattcatgttagcggttggcggttcctgttcaaataacttggtgcagtcaattaattcaactgtactgttaggattggctttttttactaaagaacgtaaaaaatcagccgcatgttgtgagaaagggtgatatttacgttcatcactgtgtgcctccatcgttaaaatataaagatgcaattcttgagcaccagaatttttgattaaagataaggtggaaatcaaaacgccatcttgagcattttcatctccacaaaaaagaatattcatgataaactcctattttttatttcttttgaatatattgacaatattcataatcgctattttttgcacgctgcttcattacctgccaaatttcatcgtgaagcttattttgagcttccttacggcttaaatttgtatccgggtaaaagggcccatcaatgtaaataacggcactaggccgcttgctaagccactttttatggtaggttttggtcatgacgaaactaggcgcatttaatttaactggaaagtgcatgcttgttgcatcgaacgggcgaatcttcgtgtaatagggccagacatgagcttcagggtagatgagaatctcgccctttttatccttaatcacagtttgaatggctttaattagtttgagcgattgcttcatatttttgccaacaggcagaccgccgtagcgtacaagatatttgccaatgaaggggatgccccagttagcttgattagcaatagcataaaaatttttgattggaaaaattgtgagcgaggtaaagacatcccccatgggtctagtatggttgccataaataaaatagcccccattgacttgcttaagtttttcttgaccaacgacttttacatgatcgaagaagcggaaaaccacccaaccaaaagcgcatgctaagtgacaagcggtagtggaccagattctagctccaagagaattaggtagaataacgtaattatcgggtagactgaaattttgatcgtgactatcgactacatcatcggttgttttttggtaataataaatccgtttcatcttgccctccatgatacttatgtatcctatgataccatggaaaaaagcctaattcctaagacgagaggaatgctgaaagaaaataaaaaagattcgtaatttcatgatcgaaaaatacgaatcctctgtaaaatagcataaaaaaagcaccgccttcttgcagtgcatctttcatattatgggtggccaggggatcgaaccctggacccacggattaagagtccgttgctctgccagctgagctagccacccatatttgttcatcagctcccgccgacatttaaatatattaccagtagttttataatttgacaagctttttttgaaaaaagttgaaaaataatttgaagctagcaaaaagcgcccataatggccgcttttttactaaagtttatcttgaatatgataggctgtgccttgctgatcctgcttcatgtgatctgcatagtaaacagcatagacaccgctttgatcatttttggcaatcacaatttggcgccctgttggacgttctgccttaatgatttgagcactgcggcgtgcttctttaaagtcgtgtgaagatgcgatggcatcccctggattaaaaaatacagcttcgttcattgtaaagccccctcgtacaaattctaattttattttaccaataaagccctttctaaatccaatttaagaaacaaaaaagagataagatcaacatcttatctcttacgaaaaatattatgggtggccaggggatcgaaccctggacccacggattaagagtccgttgctctgccagctgagctagccacccatgtcgttgaatcaatcaacagatattattatgctattgttgataagaaaatgcaagctttttttgaaaaaaaacaaaaatttttggctaatgttacaaaattcagtataatgtaagggcaaaggaggcattcccgatgccaaagaagattctcgtcgtcgacgatgaaaagccgatttctgatattatcaaatttaatttaactaaggaaggctttgatgtcgacaccgcctatgatggcgaagaagctgttaaaaaagttgacgaatacgacccggatctaatgattctggatttgatgttgcccaaaaaagatgggttggaagttgcgcgtgaagttcgtcaaacgcatgacatgccaattatcatggtaactgctaaagatactgaaattgataaagtcttaggactggaaatgggtgcagatgactacgtaaccaagccgttttctaaccgggaattagttgcccgtgtgaaggctaacctgcgtcgtcgtgatattgttaaaaaagcagaagctgccagccaagaagagaccgataagaatattaagatcggtaacttggtcattatgccagatgcctatattgtagaaaaaaatggtaagaagattgaacttactcaccgtgaatttgaacttctttactatttagctcaacatatgggacaagttatgactcgtgaacacctgcttcagactgtttggggttatgactacttcggtgatgtgcggactgtagacgtaacggtgcaccgtttaagagaaaagattgaagataatccaatccaacctcaaattttagttacccgtcgtggtgttggctattatgtaaaacagccgagtgaagaataataaagaaagccacagaactgttatggtagtggctttcttttttatattttttagatattgaatgagtagaatgaaaaaattcaaagcaagattaaatagtacatttaattccattaatactaaaattgcaattgtgttcatgctgatgctactggcaacaattgaagttattggagcttattttacccgtcaattagagcaaaatagcattgaaaatttccaatcatcaatccagattcagactatcgtcagcaatcagttagctaatcagttgaccagtgataataaaaatactaatgatcgcttgaatcaaattgttaatgactacaataatgatgcaattagtgaaattattgttgtcgataataaggatacgattcgtgccgtttctaacttaaatgataaaagtaagatcggtcaacggattaacaatactgatgtgaagcaggttatttcaactggacatcaaattaataaagtggtcgatgatcatggcaattacatgattcaaatatcgccgttgactagtggcaatggctctaacaatactgttggtgctgtctatgttaaagctagtatgcaagatgtctttaacaatttgcgccaaatttcattgactttcttgattgcgtcattgatcgcggctttattaggtgcatttttgtcattagttatttcccgggcaattacgcaaccgatcgaagaaatgcagaaacaagcattgcatattgctgatggtgattattcaagtcaggtaaaaatttattccaatgatgaactagggcaattagctaaagcatttaataccctgtccgtacgaattgaacgctcacaagaagagtctgatagtgaacggcggcgactagatagtgttctgtcacacatgagcgatggagttctagccactgatcgtcatggtaacgtcagtgtggttaatcatatggcactaaactttttaaataaaaaagaagacgaggttatcaataagccgattgctgaagtactgggactagaagatacttcgtcacaagatttgatttctagtcaaaaagagatcgttattacccttgatccaggtacgcgggatgaaattattttgcatgctagtttttctttgattaagcgggtaactggctttgtatcagggtcagtttgtgtattacacgatgtaactgagcaacaaaagaatgaagattcacaaagacagtttgtttctaatgtctcacacgaattgagaacacctttaacaagtttgcaggcttatattgaagctcttaatgagggtgcttggaagaatccagagattgctcctaagtttttggaagttacccaacaagaaactagtcggatgattagaatgatcaatgacttgttgagtttgtctagaatggaccgtggcgtttcaaaaatggatctagaatttgttaacttaaacgattttgttaaccatattcttaaccgtttcgatatgattgttaaaacagataaaaataaagaaaagaagaaatacacaattaagcgtgaattaggcagtcaagccttatgggtggaaatcgataccgataagatgatgcaggtaattgataacattatgaacaatgcaattaagtattcacctgatggcggtgtaattactgttagaatgacccaaaaccaaaatcatgttatcttaagtatttctgaccagggcttgggtattccaagaaaagatctgggtaaaatctttgaccgcttttaccgagttgataaggcacgttcccgggcccaaggtggtaccggcttgggcttggccattgctaaagaaattgtggaagctcaccatggtaaaatttgggctgacagtagcgaaggcaaggggtctactttctatatttccttgccatatgaaccgatgacagaggaggatgattgggatgaagtttaaattcaaattcggtgaatttttcttaggcttagctacactgatcgtcattgtcctctcaattgtgctttggatctttattatgactagtgatcagcgctttagtaatattggtcagcaaaatcaaaataatatcactaaagagcaaacgcgtagtcacaattttaagtcattatatgatttatatattccaactacttcatatggttttgctaatggaaatttgtgtcagctatatgattcaaaaaataatttgactttagaatttaccaaagagataaaaaaagccaaggccactaataaaattaagaaaatagttgatactagaactaaatatgaagagtatttaaacaatcccaactatgtgcagttggtttatccagatgaaattactttctccttatttaaccagttgaataatgccgcaaatgataaccgcgagtttaaccgcttctttatctcgcagtcaaatcactggatttatttgggaaatgatcagactaatgaaatttatcaagtaaaaattgctggcgcaaattttgataaactacgtaaatatgcatgtaatgctaagagcaagtatccagttagattagttcgtttaaaggaaggctattcaccgttttacatcaagacaatgaatgctaaagtttatagttacttgactaatcatcaatcgtattcttactttgtttcgcgtttattaggtacatctggcgttactagtaagactaataagaatggtcaaacggtatattctttgaactactatactcgcttaagagtgccagattctaattcaggtgagcataattatctttatactcattatgaaaaaaataagatccccaatactactaaccgcttattagatagcgtttattatgttcaccaattgggtttaaccgagcaagatttacgcttctttgatgcagatggtgctaatgttagttatctaaactatattgaagggattcctgttttcttaaataagcatgatttgcaagtcaagacgaccttttcaacagattcgattaatgtggcctttaatagtgtaaacttccaaattccaattccgtttgatggtcaaactaagcggttaaaaccaacccaagatgttgttgatgaattagtcaatcacggcctaaagcaggaagatattcaacgaattatcgttggttttgctgaagaaaaggattcaagtcaccatagtttgattaacttgatcccaacgtactatatcaaagcctacgatgaatggaagagcctaggtgaatgggaaaagcaagacgtatctacctaccgtgaagctgatcagttaactgttaacgaagggggaaaatagaaatggaccataaacgaatcgaatggctatttttcgttgttttctttttaattgatatttatcttggaatcgaaattctccgttctcccgttaatttaagtaacgctgataccactactcgtagtgttgctagcatccgcaatgaaatgaagtcagacaatattgatttgcccgataagatttcggatgcaccagattctggttattatttagctaccaagaatcgtgactatctctctggcaaagttagctcgctgactaatgtaaatgcccgctattctaaaagcgataatgtgctttatggtgaaccaagacaagcagtccttttgagtaaaaaacctaaggaagctttagaacaaattgaagattttaagaatgattcgaaaaatattccttatggtaaagaattcaagtatgaacctgatatgtcgagtgaagacaattatgtttttgtgcaaaactcagattatggtgaaatttatgctaactcggcccaattgaatatcaatgtaaaagataatcagattattaattttactgaaacatatatggggcaagctagtccagtgcgtgaattacagtcaaccatcagtgcttggcgtgctgtgcgtgcgatgtacactgatcgtgagttgactaataattcgcgcgtaacgcaggtaaaattaggttactccaaactgacagaagtacgtggcagcacaatcttgttgccaacttggctggtttgggtagaaaataagacaactaaaaatatcacgatgaaacgtattaatgcatatacggcacagatgctacaatcgagtacctataatgtagaaaagtagaagggacaaaaattgaaggtttccgttttagcaagcggctcgaccggcaataccagtttaatcgttacaggccagcataaaatcctgatggatgctggcatttctggtaagaaaactaaagatttgctagccgaagttggagttgatattaacgagattgatatggcctttttaagtcatgatcataccgatcatagtggcggactcggcgtgttgatgcgccgttatcctaagatagatgcttttgccaatagtgggacttggcagtatttattggatacgaaaaaaataggtaaattaccggctgaacaaatgaatacaattgaaccaggccaaactaaaacttttggtgatgttgatattactgcctttgcaactagtcatgacgcagctgagccgcaatattatgtgtttactagtggtggtaagcgggtcgcttttttaactgatacaggttatgtatcagaagaagttgaagggacaattgaagatgctgatgcctatatgatggaatttaattatgataatatgatgctcagagatggaccatattcctgggcactgaagcagcgaattttgtcggatgtaggccatttatctaatgacgaagcagcccaggcattagttgatgtagtcacacctaaaacaaagcatatctttttagcgcatcgcagccaacataataatacggagtatttagctcacgaaacggcaaaggaaatgctgcttgagggggatgcgaatttggatgatgatgttaagattattgatacagaacctaatcagcctacaaaattagttgaaatttagcagttttcacaacattttttcatataatattcaaatttaatcggtatgattagtaaacaagatgaggggagaagcaagcatggtagaaaatcaaaataataataacaatttacaacaacctagaaaaaagaatactaatggtaaaatcattgccactgcagcgattgtcggtgtagttggtggcttgatcggtggaggcgtttcatattacgcagctgatcaaatgaataatgcatcagttaataatggtgccgctcaaactagtgtatcttcaagtagtagtaaagtttcagaaaagagtgctaagactagtggcacaatgactactgcatataatgatgtaaaaggagcggttgtttcagttattaacttaaaacgccaatcaagttctaatagtactaattcactttataatagtttattcggtaatgatgacagtgatgatagctattcatcaagcagcaagggcaagcttgagacttacagtgaaggctcaggtgtagtctacatgaaatctaatggcaagggctatatcgttactaacaaccacgttatctcaggcagtgatgctgttcaggtaatgctagctaatggcaagacagtaaatgctaaagttgttggtaaggatagtacaactgacttagctgtgctttcaattgatgctaagtatgtgactaagacggccgaatttggcgattctaagagcttacaagctggtcaaactgtcattgccgttggttcaccattaggtagtgaatatgcttctacggtaacgcaagggattatttcagcaccggctagaaccatttctacttcatcaggcaatcaacaaacggttattcaaactgatgccgcaattaacccaggtaactcaggtggtgccttggttaactcagctggtcaagtgatcgggattaactcaatgaagttagcccaatcaagtgatggtacttctgtcgaaggaatgggctttgcaattccatcaaacgaagtagttacgattgtgaacgaattagttaagaagggtaagattacccgtccacaacttggcgtaagggtaatcgcacttcaaggtattccagaaggctacagaagccgcttgaagataaattctactttgaagagtggtatttacattgcctcagtaaacaagaatagttcagctgctaatgccggaatgaagagcggcgacgttattaccaaggttgacggcaagaagattgatgatgtggcatcgttacacagcattttatacagccataaagtcggtgataccgtaaatgttaccgtgaacagaaatggtaaggatgtcaacttaaaggtaaaacttgagggtaactaaaaatcaaaatagaagttaattaaaagaaaaaaggctatatcacgcggtttaaacgtagatatagcctttttgttaactttttaaatgtgtaacatcaaattgttcggaattatttgttgtcaaacagacactagcctgttgataagtgtggataactctgtggattgtgtataacttgataaatataggtttattaacttgtggaaaaatatgatgattttgaccttatttagtgaattctatttgagaaaacaggcgttcatgcaggcataacaagccttaagagataaagtttgtgaaaaaaggctttcataaaatcgatgtgaataaagaaattttagaaaaattattaaatacaacttctggggtataagtaaaataataccacaaaatgttgaaattggtctttgaagttttgtggaaaagtttgggtaaatagtgtggaagggatgttagtattgtgctggtagattaaaattatgaatggaaaattagctatgcttgttataatagaagcatgaatatcaaaattgtatgtgttggaaaattaaaagagaagtattttagggatgcaattgcggagtatgagaaacgactcagtcgttttgcaaaggtgtccattgtacaggtgcctgatgaaaaagcaccggaaaaattcagtgcagctgaagatgagaaggttaaagagattgaaggtcagcgaatcctgagcaaaattaaagataaggagtacgtgtatgtgactgcaattaaaggaaagcagcgcagcagcgaagagttcgctaaagagattcaggatctcgcaacttatggtcattcagacattacgtttgtcattggtggcagtttagggactagcgatgctgtaaacaagaggggaaatgacttgattagttttggtaaattgacgatgccacaccagttgatgcgcgtggtgttgattgaacaaatctatcgtgcatttatgattaactcaggtagtccttatcataagtagaatatagaaaaagcccataaattgggctttttatttttgcatatttgcagatttcacaagcatattgaaaaaaactgtggcaggtcagtgcttttttagttttttatgatttaaaaatagattttgttaaattatgtttggcaacaaaaaagacgatctttcgatcgccctgataatttttgagctaccagctagtagctcacgcacacgctgaagtgtactttatctttgtagtatctcaattttaacacataaatggtaaaattaaaactgcacgctgaagggggtaagtgtcaatgtttttgcggtagcctttaaaccattagtctaaccttaatttcttaaatatttatatgacttaaatttctgcttagcttgcttaaataactattgccagctacctgtgcggttaatgcgccatgctggatgcctaaatgaacttcatgacgcttctttaagctgtcacgggccgctgcttttaattcctgttcagtcaatacagttatttctgaatcttcaaactcgctgctaagccaaaattccagctctcgattcttgatgcagcttaagatcctaagcatgccttctgctccagattttgaccatttcttgccttgccccttaacacggtaggtatacttgcggtggttgctctcgcagcagccaatggctttagtcacagtcagttttcgtttcttaaacggcttaatatcgtcccaatgacgatcaatataattccttaggcgccccagataatcatgattgagctcggtattcaattcatcaattagtcggctttctgcagtggttaggatagttttaactttgtcatagctgtatttgtattccaaagcagaaatcagcttgccttgcaggtcaggcgcaaaatatagcctttctttgattttcttatttaggtgaaagacatccaagaaatgctcatgacgcttgcatagccctacaatgtcatcgaagtctgttttggcatatccagcaccgccatcggcgttgctaagaattacagtatcagaaagatcataagtattggccaggtactccttggcttcgttcagcgcatcaagtcggcttaaagaaacaaattccttggcattgattcgctttctgcgtttcttgcttatattgacaatgccttcacagacctgatagcgatgaaattccaaccggcttttagtgcctttgatcaccacgccatcgccttcaagatacaaaactgggacctttttcttagtgcctgcggcatcatatcttgaatctgcttcttggcccgctttaatatttttcccggccatttttaccaaattgcccacctgcatatggctaatattaaagccagacaggcaattgactgctagagcagtattgcgataagtggcaacgctgcttacttctaagatgtttttgactgctaaaatactgtagcgcttgtatttgtcaaagcccattaattcatccaagggataccttgcttgtttgcctgggcagacatatcttcttctgacatacctaacttcgccaaaagccatattgattgagcgctcattcttcttatcaatctgatagccctgtgctttaaccttggtaatcatttcatcatcaactttagctaaagccaaggccatgatttccttaatcaggtttaagaagaaacagattatttttctttcacgcttaatataattatcttcagactttataatatttgcgatttcagttacaattgaattcataaaagaccagcttctaatgtgttttttgttcttaacatcagactactggtctttttgtttgagctcaagtccaaattcaaaggacttgggcttttttaattatttattcaacttaccgtaaaaaattatacacttagctgaaggggtagcgcccttactcgtgtggaaggaggtagactcaatacagccgtccttcggggcggctttttttatgatgaaaatggcaagtcattgggtgaaaagtattacgcatatcgtgcagtaactgtaaatcaaagtcccataacaattaatggcgctaaattctacaagttggctgatagggatgcttatattaaggtgaccaatattagtggtcaaggtcgcgttttaaagcgtaacgcctacatctacagtacatcaaaaaaaacgcactacgcataacggtgcttggaagttgtacaaaggctccacagtgacaacttacggtggttcatacaagtttaagaatggcaaacgctattacagaattggcggacctgctaagcaatatgtaagaacatcaaactttaattagaagttgaatatcatttacgacagcaacataatagttgctgtttttttgcctcaaaaaccatagaaaatcttctgtaatcaaggtaaaatgaaattgattttacaaatatcatggaggatgttggaatgagaaaacgatggacagcagctgttattgctgctttagttgccgtaagtactgccgcaactactgttaaggctgacgatactaacacaacagctaatactaatgagacgcaagtaactgcaactagtgaccaaactaattctgattcagataaggttacttataacaaggcagattatttgtctgctaaccctaaattagtgcgaattaagcatgcaactactgcttataaggatgctgcattgactaaatcagcacagagcgtaaaagcaggatcacactttttaattagtcgaattgttaaatctgacaaccaagtaccaatactaaagactagtgatggcttgtatttgcctgctaaaaaatctttggtaactaaggtcatagcctaccaaaatcctaagggttatcatcaagtacattacacacaagttaaaccatacggtaaggtgggttataacttgtaccgtggctatgagggtattaagacttggaaagtaatgcatagagttggtacttgggcaggtacgaattactataaccaagctacttataacgcagtaaagaacttccaacgtagtcaccacttgccagcaactggtaatgttaacttagctacttgggaaaagatgggcttttctaagaagtcatggtatagcattgatagttatgttgccccacttaaggcttatgcttggcaagggcgtaaagctcatattgaagcaatgattaatcaagcttacaaatatatgggaaaaccatggttagcaggttgttcaactagtccaagctacggtgttgattgttctggtttggtaatgcaaggtctttatgcaggtggcattagtccagttccaactagttcaatcggccacgctcatccaggcaatgaatggaattcacgtaatctttgggctgacaagcacctaaagcgtgttccatattcacaaagacaatgtggagacttagtgttctattaccaaccaggtacgcacactatttggcatgttgcgatttacttaggcaataaccgggtaattgaaagctggccaccacgtgtgatggttcaaccaattgttaattcacaaagaaatgtaattgctggtattaagcgaccatttatttaaggaaaaatatgaaaaaatacttagctattttattagtcagcctgggctttagttcattattgttaactcgccaaacagtacatgccgctgataatgatgatgccgcgacaactaatcaatcggctcctaagtatactggccttaaaaaagttggtaaacattatgtctattttgatcaagcaggcaagcaacgttttaaaaataccaagactaaaaaagcatattattggattaataaaagcggcaagatagttggtattaataactacgccaaggtaattagccaactacctgaaatgccaactggttgtgaaattactgccgtgacaatgatgattaattttgctggtaaaaaggtaactaaacagcaggcggccaagattatgccgcgcagctctaaccctaacaagggctttatcggttcgccttacaagaaatatccgctcggctattgggttgctcctaatggggtgaaaccagtagtgaagcattatcttggtagagcacagaatatgattaattgtggtttgcccgcaattaaggataagctgattaattcacacttggtggttgtttgggtagggatgtttgacggcctctctaaccatgctattaccttgacgggttaccatggtaaaacgatctattataatgatccttggactggaaccaagcggaaaatcaagcaggaaatttttgcaacgcattgggctttagatgctcatcgggcgttgagttattaattttatgtaaatatatttactttttagtcatgttgatcaagccactttcgcagcatttcaacatattcatctgttttttctacaaaagacatgtgaccgcagttttcaaatagctgccatttactgccagcaagctgatcctgcatcgttttagctacataaggtgtacataaatcatcagtcccactcgtaattagagttgggatttttattttgcctagtttttctgtgtattcgtaatcgtgcaagttgccctctggcgtatattcatttggtccccaggcggtttcataagctacaataccaccacatttttttcgcataacgcattcaggccacgttttcgtcatgtcaattgcatgttgattcatgaagtgctcattagcttttaagtaatcaggatcgttaaaattgctagtcaattcggcgcgatgaattgccgcctgttcttcaattggcaagtatttaatcatccggtgtaattctttgctccataaggaagcagacgacaaggttgaagacaagatcaagctttgaatgccaacaggatgataatcacacatgtagattagtgctagcatcccgccccaactttgtcctaataaatgtattttgcgcaaagccaagtgctcccgcaacgccatgagttccttaacccatgtttctttagtataaagttcagggtgatcatcagggatgctactcttgccgcagcctaactggtcgtacatgataatccgtcggttatcaatttcggctaatttgtccaaaacctcaaaataattatgacttgagccgggaccaccatgtagcaatacgagtggtgtcttttcgcttcttcgaccaacaatacgatagtaagtttcatagcccatgaaaggcatttttccttcgataacttccattttttacctatttgaacaaaaacaatgagatattaaccaaaattagcagggtaaagaagattacccaatctctagctgttaaaggaatagcgatgatcgtcgaccttctttgcccttcgacatagccatgtgattccattccttgggccagattgtcagctgaatttaaagcaacaagaattgctttaaaatagaggaccggcgaccaaaaactgagataaatgccccgcatcatagcgctagttcggatctgtttaaccgccatcttcatctgcggaataatgttaatcgccgccagcacgccgtaggcaaatttactgggtaagtgcaggttctgctctaatgatcgggcaaagtctgtagcggtgttattacgtgtcacgcaggcaatcgtcaaggtataaacatagatacgcgttgacaaattccaagcataataagcatttggtgttggtgaaaaccaaaagagcgttgcaaagattgtaaaagcagcaataaagggcaagataatgagcaagattaactctttgattttgattcgagtaataattaaataaactagcgcgaaggtgattactaacaaattagtaactaagctagcttttaaagatatttccagggaaataataaatgctaaaagaaattttaaactaggattcataagcttatctttctacatattttaagcgctgatccgcaaaaatcaggtggtaatcgcaaaattcagctagctcgtctatctgatggctaatgataaaaaacgtctggtggagcttttgctggctttctcgcattaattctaaaacgagtttgaccgagttatggtcaagtccactgagcggttcatcaattaataaaacctgatgcttagtcattagcattaatagaatctgtaatttcttctgttggccacctgagagagaataaacaacttggtctaagtgtttggctaaacccaatttatctagccattcattgaccttttcttcagtaaaaaataaatttctatcctttttacttaattctagttcatctttgacagtcacagctaaaaattggtcgcttgctttttgaaaaatttgagctacttgtgttaaatattttctagctgagatttgagcgatttccttatttaaataagcaaaattaccagtatacggaatcattttggtcattactttaaataaagacgtcttgccaacaccattagcaccagtaattagggtagtgccagaatgcaaatttagctcattttgcttaagcaaaagcttgttttgtctaatttggacttgttttaaagtgaaaataggctcactattaggtaagacaaaatgataatgtcgctcatgcaattttttattttgttcaaataaggctatttttttgctagcatttaattcaataacttcttgattatttgtaaactcaaaaagatggtcgcagacaggttcataatcgtctaaaacgtggtcacttaaaataatagtttttccgttgtgagctaaaatcgctaattttttaatcaaaaaagcacgtgtcttaggatcacaactggcaaacggttcatctaagagcaataaatctacatccatagctattaagacagctaaagcaactcgttgttgctgaccgcctgatagagtattaatcttttgatcgagaaggtctgcaatttgggtgaaagctgttgcctgatctagtcgtgtttgatactcaccttcatctaactgtaaattttctaaagcaaagacaatttcttcacgtggagttggcattgtaaactgttcagccgcattttggaacatcattgccgccttttgtccgtgcaggtccaccatacctgttagtcgccctgcatatttgggatacaaaccagcgataattttgagtaaggtagatttaccgcagccggtcggtccaattaacagagaaaaaccatggggaatttcaatatttagatgattgataataggttctttttcataagaaaaagtaagattgttaacggttactttcataagcttgattgtacaagatgctttggggactgtctacaggtaaagtttgttataagtagaacaaatcataaataatacttaatactaaataaagttttgatttataatgtaattatagtgttaccatattttatttaatttaaggaaggtggacatatggcagctgttgctttggaccaatatctggcaagtgtattaaagtcaaattcaacagataagaatgaaataaagttggaagctggtaatccagattttgatctgtttactatctaccttgaaaatcataatactggtattcatcgctatcggatggatgtttcaacgattttatatattgctaagggtactgtgacaattaagagtggtgaaaagatcattcaaatgaagtctgggaatgttttgctactgactgaaggttgcaagtatgagattttaagtcaaaaacctgatacggtactgataaagttgaagtttaagcgtggatttctatatcgcaagtattttaaagattttagctgtaagggagaacgtgaggttaaagttattgagcaaatcgttgatagcttagaaaatgaacatgttctttggctaaaaaataatcaaattactcgtgcttctcaagtgatgcaacatattattggcggttatttgaataatgatttgtttactaaagctttaattcaggctgagttgaccactatgttgattatttcaattagaactcagcgcatggcaacaccgactagtttggataaaactaagtttgaaaagaagaccttagataattacatcgatcttcattttgccgatgtctctttatctgacgctgcaaaatactttggcttcaatcctaattatttctctaatatggttaaggctaagactggcaagagttttgtggatcacgtggatgatcgaagaatgcaagaagcgcgtgaattgctggctcagcctgatatttcacttagagagattattggtcgagtcggatattcgagtaagtctttcttttataagaaatttaatcaatactaccacataacaccagcagcgatgcgggcagaattgtttagacaagcaaatatcaatttaaagtaaaaaaataatctggacgaaagttccagattattttttacatattttctaagcgtttaatgcggtctgctgttggtgggtgagtatcaaacaagtgcgtcaaaccgtgattgtggaatggattttcaatatataatccagcactactactatcagctactttcattggttggctattttcaatcttgcgtaaggcagaaattaagccttgcggattacgtgttaatttaactgaagatgcatcagctaggtattcacggttacgcgataaagccatttgggctagggatgcagaaagtgggcctaagatcaacacaaagaccaaggcaaccactttaaaaattatggctaaagcattactgtcacggtcatcgtcgtcatcactgcgcacgccgccccagaaccaaaaattggacgccatattagagataaaagaaatgaccccaactaataccacggcaattgttgaaagtaaaatatcgtagtttttcacgtgtgataattcatgccctaagacgccttcgagttcttcacgatcaagtaattctaaaattccttgagtaactgccaccgcactatgttcagggtcccgaccagttgcaaaagcattgggactaggatcaggaataatatagacccgtggcattggaacctgtgccaccatcgccatatcttctacgatatgccacagttccggattgtcggcttcatgaatttcttgcgcgtgattcaagctcataatcatgttggctggattttgccacatgatgaataagtagactaaactaccgatcaaagcaatagtaacgcccattgttggactattgctccaaagataaccgattcccgcaccaactaagcctaagatcaccaaaaagatgaacataattaacgccgttttgcgtttattacgagcaatttgttggtaaagcatggttaaacttccttaaaattaaaacttaacttgaggcacattcttttcttcactaggagtttctaagtagttaatcttagtaaagtggtgccacttggcaacaatatttgatgggaaagtaagcaacttttgatcatatgttgctacagttgaattataaagttgacgagagtaagcgatcttgttttcagtgttagtcaattcttcttgcaattttaagaagttttgattagctttcaagtctgggtaggcttcagccaaagcaaaaattgacttcagagaatcagtaatttggttagaaagcttcatcgcttcttcatggttaccttgaggcacattaaccaattgattacgtaatttgactacttcctcaaaagttgatttttcatgcttggcatagcctttggtggtttcaaccaagttgggaattaagtcattccggcgcttaagttgaacgtcaatttgactccaagcttcttcagcatagactttcgctctttgtaaaccgttgtaagttactatgtagatagccacgattaaaacaataatagctaaaatgatccaaattaaaggtgacatagtttttcctccataaaatatttatttaattttatcgttttcgaatttcttgagcaataaaaaagaatgtcaaagcggcattcttaacaaaaaatattaaattctgaagattaatagtaataatccaactgcagttaaaataatcaaaccagcaaattgcataatagtccattgaataaaaaactttttcttacttacgctaccgtgttggttgaaagtcttaagaactaacatattagccattgaaccgatagcggaaccaaaaccaccaatgtttgaacccaagaataatgcttgagcataagtggtaaatttaccaactaaaatggttgatggtacattgctcattacctgactagagataattgaagcaaagtaagttgaaatttcagaataaacggtgccatgaattagatttacgataagagggatttgttggatatcgctgatgaagatgaagaagccggtaaaggtaagaagtaaggcatagtcgattttgagcataatcctaggattaattgcaagggctaatgcaaccgacgttagcatttgccaaataatatcaatggttctgaaaacaccaaagaagaagaaaataaagacagcagtagttatcagcgtcgggcgccagctgatcttgattggctcagctttttgcaccggaatttcttctttaggaataaacagaaagactaatcccatgattagcattgaaactactagataaggtacagaccattcgaaaaattttaatgggctgacatcaaagcggctgactgagaaaatattgtgggggttgccccaaggcgtaaatgctgccccaatatttgcgcccatcccaatcaaggtaacaggcaaaatctgtggcaatttataacgcttagcaatatttaaatacagtgggatcaaggtcaatgcagtaatgtcattacctaaaaacatccccgaaatgacagccaacaacgaaaacagcgtgttcaacttacgcgtattatcggcaatacttgtaagcttgtacgctaaaacatccagaacatgcaagtatgcatagatctggataatcgttaacatcgcggcaacagaccataatgtatggaagttaatgtccgcaaaccgcggtctggcaaaaaaaagactgactactgtaatgatcacagtaatctgtaaaattctatctttagcaatattctttaagacggtcataaaaggtcccccttacgtattacaatcgtctaaaaaccctatgtaccattttgagcctttttgttattgcatgcaatgataaatttaaaaaaatatcaagattagcggtatttttgagcatatttttagttagttggaactagtcgtgctatacttaaataagtaagttaataaaatttagattgaaacgaggaaacaaaatgacagagaatgcaatttcaatcaatattaaaccagatgctgcagaaatgattaaaagcaagatggatgcagatcaccaaattgttatcttggctttagatgatggttcaaccaagtattctaaaaaaggcggcacttgtactattggcgacagcttccagtttgtaatccttgctgaaaaagatcctaagtataatatttcaatcgaaaataatgctggtcttgacttgtatactgctcagccggaaacaactttctttgaaccaggtctagtggtaatgcacgcaactcaactttgagtttatcttcagacagcggcattattgatggtgggatgaccgttacccaatatgaacctgaagcaattactgctgatgatctaaaaaacggcggtcaatgttaaaaaaataaaattaatcatagggacgagggaatgacctcgtccttttttagtatagaattaagaaagtgatttcaatgtaaggggggaagaacaatgacttttgtcaaagaaataaaagcaggtagtcgtgaattttgccaaaattggctgcggtatctgctactttttatgggattaagtttatttaatcaatttattgttattccactttttcgctatattacaacctttgttttgcaggctagtgctattccgttcgtatcttatcaaaatgtagtgacgatcattacgacgcatacggttgcctttttaattttgataattgagttgctgcttttattagtaatcttgtatgcgcaattagcttatttacttcatggcgtttgggatattaagcatcaagtttttacgtggaaaaatagttttattcaaacttggcaaaatatcaaaaaaattcgtttgggcacgctttttattttgatgctctattttttattggtagtaccgttagccgatgtcatctttagaacaccacttttaagcaaagtgcagatttcagaatttatcttggattatctgacgagaacgccaatcttgttagccgttttgattgcgttttatttagccgctttgatccttggtgcaaggctagtatttgctttacccatcatcgtttttgaccacttaaagtcagtgcaagcagtaaaaagaagttggcgattaacggcgcactaccgttggcggacgatttgctggaggattattgttttagccgttttatctgcagcagtcatgacaattttctatttagcaatgtattgcctgcagctattagttgatttattacctgggaaatgtccgttaattttagccattatcaatctttcgcttgttcaaattattagtgaagtagcgttagtctatgttagtgtactgggcttatctattattttgaaagctttaaggcaagaaaagataagtcaaacaggtaaaactaaaaagataattctaagtacattagttgtgtttgtactagtaatgattaatgcaatatccaccaattatttatatttgactagtgtaaatgctaaagcgccagtaattatttctcatcgcggcgttgatgataaaaatggcgtacaaaacacgttacagtcattaagaaaaacggctaaagaaaagccaaactacgttgaaattgatgttcatgaaactaaggataaaaaatttatcgtaattcatgatgagaatttattgaagctaacgggagttaataaagccccgaatgatttaactttacggcaattagaaaagttaactgccaaagaagacggctatcatgctaagttagttagctttgatcaatatcttgaggaagccaaaagactgcatcaaaaattgctaattgaaattaaaacgacggctaaagattcgaagaaaatgctgcagtgctttaatcaaaaatatggcaaaacgattcttaaaaatgcgtatcaaggacaatcactcgactatcgcgtggttgaaggactgcacttaattaatccacgtttggttgtcttttacattcaaccttataattttacttatccgcaaagtgttgctagtggatattcaatggaatattctaccttgaattcagactttatttggcaagcccatttgcaggatcgtcctgtttatgcctggacagttaatgacgaaaaattaatgaagaagatgatgtatcaacaagttgatggcttaattactgatcgagttgatttagctaaaaaggcaattaaaagtttccaaaaagatgctagttatgctacgcgaatcttaaattatattgttgtcctgcatctgtcgaaaaattttgaatctgcatgaagacttgatctgaagggctggacatggtaaactatactagattttcgaaaatctgaaaggaagtatagcatatgcgtaaaggtgaaaattacaacactggttgtgaaccaaaccaaagacctaagaacaagagaaacgcaaagaagcgtgttgctcacgtagcagcagttgttgctttcttgaacaaggccgcaaaagatgaaaacaagtagtctttaataatattgaaataaaagctaggagctgacgcctctagctttttttgtgcttactgaaaaaattaattctaagtgtataattttttacggtaagttgaataaataattaaaaaagcccaagtcctttgaatttggacttgagctcaaacaaaaagaccagtagtctgatgttaagaacaaaaaacacattagaagctggtcttttatgaattcaattgtaactgaaatcgcaaatattataaagtctgaagataattatattaagcgtgaaagaaaaataatctgtttcttcttaaacctgattaaggaaatcatggccttggctttagctaaagttgatgatgaaatgattaccaaggttaaagcacagcaagttcttagttaaaatcacgccacttaagcgttacccaaaagttacgttagttgtaccagctcataatgaagaattagttattagtaaaactacgcaggcaattttaaatttgaattatccggctgataagttacaaattttaatctatgctgataattgtactgatgatactgctaaaattgcccgggaaataatcaagcaatatcctgaacggaaaatcaatgttcaagtaattgaacgaacaggtagtggtggcaaagctggtgtattaaatgatgctttgaagattgcccaaggagaataccttggtgtatatgatgcagatgccatgccagaagaaaatgctttgtattttttaattaaaaagattttggaaaatccggtgagatataaggctgcttttggtcgcaataagacgagaaatgcgcggcagaattttttaactaagtgtatcaatcaggaaattgttgttacccagcgaattcaacactgcggtgtctggcaattatttaagattggtcgtattccagggactaactttattattaatactgattatgtcagatcaattggcggctggcgcaatggcgctttgaccgaagatactgatatttcttttaaaattatgggctcaggtagtttgattgccttagcctataattctgaagccttccagcaagaaccagaacgcttaaaagattattatttccagcgcttgcgttgggctaaaggtaactatgaagtggtgatcaataatttttgccatctttttgataaaagcaactggcgggttaaattagagactgtctattattcctgcacttttttctggtttaatttggcgattgttttatcagatctgatctttttttctaatttgattgccttaatcgtccatctttggaatcctgcagtagtaataccatttacaatttcgcggagtaatattttattagctcaaattctgctctttaattggctattgatggttttgctttatattttgcaaattaacctagcgatgactacgcaatatgggcaggcaactgacgaacagatttggctagccttagcatcatattttacttattcgcaattgttcatcattgtatcaattcatgcggttacttcagtaatgctagatcgcgtttttcatcgtgatagtactaaatgggttaagactaagagatttgcggattaggtgatgagatgaaaaaaagatggatgctactaggatttttactcgtaacgattgcatttaccggtattatgatctatatcagagcagataataattcagcggtgcgtaatttttttctacattcttggcataaaaattatgtagttgaagaaaagaatcttgcctatattaataccacgcctaagcaggaacaagtgacggttttatctgaaggccaaggatatgggatgtttattgcggcgcatgatccagcagttaaagaaagcaactttgctaagctagtgcagtattatttaaaacaccgggatcgtaatacgcaattgatggcttggcggcaaacaaagaaaaatggaaaatggagcagtgaacgcaatagcgctactgatggggacttatttattgctaaagctttgtttttagcggctaaaagatggaaaaccccagcatatcagcggcaagggcaaaaattaattgccgatattttgcgttatgaatataatccgacaacgcacgctttaacggtgggcaattgggccgattctaagtcgaagtattataatttaatgcggacttcagatgtattgccgacaatgtttgatcaattttatcgtgaaagcaatgattcgcggtggctcttaattaaaaaaacaatgctcaagcggctcaatcagttgagtcaccagcataagagtggcctagttccagactttgcctggctgacatcaaaagatgctaagccagttaaaggaagggttaccactgatcgatatgatggtgattattatgccaatgcttgccgggtgccaatggatttagcatttagtaaggataaattagcaaagaatactgtacatcgcttgcttaaattttttagcaagcaaaatacaattacagcaggctatactttaaaaggcaagccggtcaataattatcaatcagctagctttagcgcgccaatttatattgcggtgaatgaaaatcgcaatcaaggctatgataatttgtttgcttcgcagcaatatatttttgctaaaaaattacctaaaaataattactatgatgcagcactaacgacgatggcaacgatactgacaccggcgcatagattttaagaggcaaaggcctctttttatttgcattgaaaatcaatctttgataacatagtaaaaattttaaggaaaatgaggaggacaaaaaatgggattaaatgcatacattcaaggttttaacagtttagagtcaattgatcgagcaccgggctacttcaagtatcatcaccactcagtagctgaccactgcttcagaacagcggaattagcacaaatgatgggagatattgaagaagtaaagggcaaaaagaagatcaactggaaggctttatatgaaaagagcttgaatcacgattatactgaacgtttcatcggtgatattaagacacctgttaaatacgctactcctcaacttagaaagatgattggtgacgttgaagaaacaatgaccactaagttcattaaggatgagattccagaagaatttcaagaaatttatactaaacgtctctcagaaggcaaagatgatactttagagggtaaaattttatcaatctgtgataaattagatttgttatatgaagcttatggagaaatcgaattaggtaatcctaacccggtttatatgcaaatgttcaaggaaagtcttgaaacgatcaagaagttcgacgatttagtttgcgtacaatactttattaagaaaattttgccagatctttttaaaggtgatttcgcgggaaaggataagatgcaacgaatagcttttagcattctattgttaggggatgattaggtgaaatttcaatgtagttcatgcgggctgcgcatggactctttgcattttaagcaagaggggttaatgaatcctaagttgaccagtatttgcgacatttgtatcacgcgcaacctgaatccagaagattacgcaaatgatgcggtcgcagcttttgctcaaagcttgctttacacgtttgtcggtgcaaagaaacaagatcaatcaggttttattgtgaaaaataaaaaggaccgtaaaaaatacgaggcctttttacaagattatgatggcaatgaaatcgcccgccaacagattaaaaggtctgatttgaatttggcggtaattaaaagcgaagatggcaagcttaattatgtgcctaaccaaggcgtaacttttgagcaaaatttaaagggaatgggtttggagatcaatttccagttaaacgaagttgattttattgatcgtgaacgcattcgggccaagtataaataccgctgccaatattgcggcagacgtggccacagcgtagatcataaggatcccgtttctcttagtcacaacaacagcttagataatttaactttagcttgtgcggaatgcaaccgaattaagtcggatatgccttataagttgtttattcaactgaatgatcaaatttctgagatcaataaaaagctagttaagtatgaagatgcgctgggtactttgagagaagaatttgagcatcgtcggcgctatttagcggctcaagtacaccttaagggtgttatcaatgatcctgagctaaatgcgattagaaagcaaaataagagcttacaggatgacattgatagtttacaaagtgattatgatgatttgcgtcaaacgcgcaagacgtattttgatacgggctggaaattagctcgcattaaggaaaataaggatattatttaaaacgtaaaaaagcgctattttttgtaaactcaattcaaaataaaaaatgagttttaaaaagatcatccccatataggaatgatctttttaatttttatctatctaattcgatcttctggatcaaataaatatttgtcccatttaacttcattttgaacagtagggtggaagagcaagaatgctagcaacagttgaccaacgtaaggaattacgcccagccaccaccaaccaccgttaaagcctgcgtcgtgcagacgacgaacagtgtgacctaattgtgctaaaaaggcccaaatagctgctgcaataaagaaaataataaaaatgatgaagattacaccgattaccttggcatcgccagaatcaaattcagtaacgctgaaaggagctaaaagcatgaaagcaagtaggtaacaagcaaatacgccgattgtcatgataacttggctaattgcagtacctacccagaatgaggttctagtagatctagcatcccacttaaagcagtcaaagaagtgttccttcaagatttgaccaatagttggtacaggaacattactttttgcgccacccttaggataatcttgatcgctgaacaagtatttgccccacttaacttggcgttgaacagatggctgcaattcaagataaaataaaaacattgcgccataaccagtgaaggcagcccagtaccaatagccgctgtagccaacatcgtgcaaacgtcggatcgtttgtcctaatgcagctaaaaatagccacagataaacaacagccgcaacaataccatcgactattctaatgccggggttgatgttttggttaaaagcatagaagccaagaaggatgcataagatgccgataacaagattaatcaaagtgctccaccagaaagatttacgcgtagttcttgctttccagttgaagggatgcaaataagcctcgttcaaaatttgcgcaaaactttctgcaggcggcagtggcagactttcgtcataaggcttgataaaataatatactctatcattcattttacttcctccaaaaattaatttgttataaattatacgctaaaaaagccgtgaagcaattaaacttcgcggcttttttgatattagaattcattatttctaaagttgctcaagaacttttgcgtcttttcattcttaggatggtcgaataattcttccggtgaaccttgttcagtaatgataccgtcactgatgaacaatacgcgatcagaaatactcttggcaaagcccatttcgtgggtaacgatcaccatcgtcaaaccggttgtagcaagcttttgcataacgtctagtacttcgccaaccatttctgggtcaagggcactagttggttcgtcgaacaataaaacttctggattcattgaaatcgcacgggcaatagctacacgctgctgctgaccaccagataattgttgtggcttagccttaatgaaaggatccatgccaaccttttctaggtttttcatggcaatcttgcgtgcttcatctttagaacgtttcaagactaattcttgaccgaccatgcagttttctaaaacatttttattttcgaatagatcaaactgttggaaaaccataccaacctttgatctaaaggtattgcggttatagccgggatgcaagatatttttaccgtgaaaatcgatctcgccgccagttggttcttcaagcaggttgatacaacgcaaagtagttgatttaccaccaccagaaggaccaatgatcgttacgatttcgcctttattgatgtcaaaggaaatatcctttaatacttggtgatttccataagacttttgcatgtgctttaagcttaaaattacttcgtttgattcagtcattaattatttgcctccgcatcttttggagtaccaacttggacttggttagccatcaagttgtaattcttattaccttcaagtctcttttcgataaagttgaagattctagtaatagtaaaggttaagatcaagtaaattgctgaaatcattaagtaagttgggaagaacttgaatgattgactggcaatagtagtaccaacgaagaacaattcagaaactgagatgatactcaatactgaagtatccttgatgttaacgataaattcgttggtgattgatggtaaacagtttctaatagcttgaggcaagatgatatgccacattctttggttgtgggtcataccaagtgcactagctgcttcgaattgaccttctggagttgaaataataccaccacggataacctcagctaagtaagcaccagtgttaattgacacaataatcaaagcagctacagttctatttaaattcaagtgccagaattgggcaataccatagtagattacggctgcttgaaccatcattggtgtaccacggaagatttctacataaacagataataaccacttaactacgttcaaagtccaacgcttgccgcgagtagttggagtaggaatggtacgaataattcctacaagcaagccgataaagaaaccaacaatggtaccaactaaagctaaaagcaaggtcatgccaatacctgacataatcatgccaccatattgcttccaagtagtaactagccagttttctttcttagtttcgttaccagccttaggttgttccttgatggcttgtgacattaattgatcacgctttttattagaaatagttcttaaagtagcgttaacttcatttaaaagcttggtattaccctttttaaccccgatactagttacggaatcgtcatggtcaactttgaagccagccattttgtttaagttaactgcaataatgttagggttaacgttgtggtaactttcaaattcaatatcttcagcaacataaccatcaatggtgccagaagctaaactttgacgcatggctgaaaagtcacgcatagctggttctcttttagcaccttttaattgcttgattaaatcgtagtgcaaagttccttgttgtgcggttaacttggcacctttgaaatcagtcaacttcttagcattagaatatttacttgccttattagtaattacgacgaaagtacttttacgataaggttctgagaaattaattgccttgcgtctttcggcagtaggagacataccagcaataattaagtcaattttacctgaagttaaagctggtaaaaggccatcccattgagtcttttctacgattacttttttgtgtagtcgtttaccgatgatcttggcaatttgaacatcataaccattagcataggagttagaaccatcaattggaacagctccattagctttggtgggctgagtccagttgtatggaggatagtttgcctccatacctatctttaacgtgccagaatctttcttagcagcttgagtctgattgctactaagagaaaaaccgataaataaactgagtaggacagacattattacagccatccatctaaatcttgacttcaattataaaacctccaaaaatagttttaacataaagccaacacaataaagagtaaacaaaaacctcgctcttccaaagaattgcgagggtcataatcatcagtgtttaaaccaaatcttatagcgctccctggggactaaccaggacagtctatagaatattcttctatagcccaacagattaacacgcgaatattaaatctatttcggcggcaaccctaagttaactatcattgttttcgcgaactcaaacttaacttgtgattgtcgcaacctctattgcattggaaaaatatttaactaatgaagaatactagaagaaaaagttaaatttgtcaagcccaaccattattagtttcataatttctctttttcatatcagaaacataaggatttcctgctacataaaaacgtaatttcttgttagcccaaacgggatcagattgattgataccaacacgcgctgcagcaattatttcctggggaatttttttatgacgatcatcaagatcaatggcaaaaggggagtctgataaaaagtgcaaattccaattcttatcatgaataccaaaagcttgcatcatttttgcgggaccattagtcaaaagaacgccatctttaccatgacggttcttgatcatggtctcaattcctaaagtgggatcgattgcacggattaaaacaccctgtggttcattctgaaccctagtggcaacatcaaagaaaaaatattgacgttgcgcgtagatatagatcgttccgcctttgccgtaaagtccttcattcgctgggctacgacgaccgccataagaatgtgcagcgcgatcctttttacccatatatgcttctgcctccacgatatagccgcctaatttttcttgaccattatcaaaagtaagcattcgcccaattaggtcttttgcaatataatcggtagtgttagtagaaaaataagttgaataattcatttttgacctttctagaaaagagataaaaaataatgacagaaattaaattagttcgaatttatgaccatgagcaacctgctggttatcggattttagttgaccgtttatggccacggggaatgagcaaagttaaggccgatttagctgaatgggataaacaaattggccctagtaaggaattgcgtcagtggtttaatcatgaagataaaaaattccctgagtttaagcaaaagtatattgaagaacttaatcataatgattatacagcggaatttttgcaagatgtaaagaagcatttggctaaagaagatgttcttttcttatttggtgccaaaaataaagagcacaaccaagcagttgtactcaaagaatatgtattaaatacgctaaacagttaaatatgtttgtgaccgtgttttttaactttccaaaagtggaagagaattgtcaaaattaagatcgcaaagacaataattgcaaaaacggtgtttggcaactcaaatctcaatggtggcagagctagtagcaattttaaagcgatgattcctatcaataagtaagccattggctgcaattctggaataatatccattaatttaatgataatttcggcaactcctctcatacagagaataccgatcatgccaccgattaaaacaacaacggggttatcagacacggctaaagcagctaaaacagaatcaattgaaaagacgatatccattgattcaattgaaataaccgtacgccagaaaagagatagcacatgtctctttttctgtttgcctttgtggtgagctgcttcgcgctcttctttttctttctcatgttcggcagcttgtttagggtggcgttgatcatagaagaatttaaaggctaggtaaaaaagataaatactaccagctaatttaatctcccaaaagttgatcagataagtcccgattccgataacaataaagcggaataaataagcaccccacaagccataaaccaaggacttgcgttgttcagctttattaggtagcacctgtgtctgtgcggccaaaacgacagcattgtcgactgataacaagcattccatcaagattaaagtcagaatgatcatccagtctttgccactggttaggacatgtaaccagttattgccgtcaaaaaagggtgcatatagtttaagaattgacatgtagttgcttcttttctaatttaattaatctgattttttctttttgtcccagacgataagtcccaactttattgttggataaaataactctttggtcaggaataaaaatcaaaacagggtttaatgctacggcgtgtgcaactgagcgagaagatgtggcttcggctagtgaattggcgacgtcaccataagttaacgtcacaccataaggaatatgctggacaacggctaatacctttcgttgaaattcagtgccgaattccgaaatatcaataggaacatcaaaattctttctgataccagcaaaatattcctttaattgtttgatatgaggtgccatctttttagggtcccgcaccaacatgcggtgagggtagaagctaaaaataggtgaaacagtttcatctcctttaagtccgacgtaagttaggccggcttctgaagctgttaaaaagtaggtccatggctcaattgtaacgtaatcatagtaaaaaaactctgtcatgtgtaacatctttattaaaaataattagtctaagaataacaaactaggaaagttaattcaaattctggaatgctgttaatgcatccccaattatttgcgtgacaccaggggtaggaatttctgtcttgttgatagagtaaattttggcgtcttctttgcgataagccaagagctgggcaaaaggataaactacaaaactcgtcccacaaatgatgatcaagtctgatttttgcattatttcaacggactggtttaatactttcggatcaatgccttcgccgtataacacaataccggggcgaataattccgccacaatctttgtgtaaatagcttttagcatattcttcataagaaacaggttgatgacatttagtacaataaatattatataaattgccatgaaattctgttacatgttgattgccagccttagtatccaaagtatcgatattttgggtaattaaattacctttttcattacaaaaatgggcgattttttcatggattaagtttggtttagcagtaggaaagtacatattgttcatgacaaattcatggaaaaattcaggtcgattgaatagcgtactatcgctcagtatagtttcgggactttcttgcacgccatcatagattccgtttttagagcggtagtcagggatacctgagtgggtagaaacaccagctccagttaagaatacaatatgttgggcattattaatatctgtttgtaattctgctaaatccatcatataatgtcaccctccgtgaaagtcactactttaattataaatcattgttttgttataatgactgaaaattgaaagcaccaaaatcaagctcaagtcctgtcactattgagctttcttagacgtaattagtttttatatgatctgtttcagtgcaatttgtatgaatcgtggcagttggttaataaagtcattgattacttcatctatcttttcaaaactattctgtttaagctcttttaattctgaaattaagtagaccaatgcatctacgaatctaatatcaggtaaggattcgttcattagatagaataaatctccgattgtcttatcatctgtattttgtctttcctgccaggtcaatagatcataagttattgctgtaactgcgatatagccacattggccatcatagctttgaacttgagatttatctaaagcaagatattgcttagacgtcttaaaatatgtttcaatttgccatctacgaccataaagttggatgatttcttcagggctaagctttgtctgagtagtagctaaaaccaaatacttgttcttgtttccacggttggagacaaagacgagctttaataaaaagctatgtccatgatattgagcctcaactatgcttgaataaagataatgtttctttttacggatgtttgaagcagccaaacgatcatacaagtctttaacgctatagcggcgatggcgataaatgtaataaatctttgaactcttcttgatcatgccaagtccatctaaaccgatcttctttaaaatccaaaacattcttggagaagaaaaccaagaatcgaataagacgtatttagcttctactcctaatcgtaaggcttgtctaatcaactctacagttacatcattcatctttctctgagcttgatttctccttttaccagaaattgaacgttcatcagcagtaatgggagcagctccaatcatatttttcttggttttggttgacatcaaggcaaagttaaccggcaagaaggtattgccatcgctccagcctaaagttaaaccacgatatccgttccaatactcatgcttgtcatggtcatagactttagctagcaattcggtctttttagaaaaagaccgagccatcagcgtatcgtcaacgataaaagcaagtcggcgtcttttatcgataaatagttttaagcagccaatgagccgggctgcaatcaagcataatagtttttgccagttgattcttccatcgttaagtacattgcgagcagttctaacggaaaaacgtttgtcatccttagctctgaataaagaaagccgagcaaaatgtactgacatcagccaagagataatcatggttaatgaaacggtggatttacgcttaaaattgacttgtttagttaacttagctagaccaattagattaataaatgaagaaattaaggatttagtatcattttctgtgtcgatttgttctatactgttcattgcgcaggatctcctttactttttaggtcgacacttaaagtataacgcagagagagcctgcgtttttatttttgataagaaaaagccaagaggcgcggggagggagcgttaatcttagctttcaagtttcagtataatgattaaaataactaaattgaggggatttttatgaaatatatgacgtatttttatgtagcaattgatattttattagtagtttatgcttgttatagttggtattggcaagctaaagttgattttcgtggtcgctatcgtatctcctcagttgtttgggcgctaatttttatctggctgggctttacatggaattacattgaaaaaggtgatccaggcctgagcgtcttcttggctctttttatcttaattagtattgtcgatggtttttcaggatttagtaaaaagcggatggtcgtttcaggctacttcaagcgtacagttaagtatgatgatttagccagcgctactttaatccagatccccaaccaagagaagccattagtgatggcgatttttcgaactagcgatggtaaggcttatatgatgcgctttaataatgaagttaatagcgtaattaagcaattacaagaatatgctggtcgagaaattcctgtcgaagttcaatcaatgatgtaattacaaaattggagaaagcattcgcgagaatgcctgcaaagtccgcaatgcgcgactttgcttttttatttcttccttagttagtaaatgcgagtgtttcatatcttcttcaaaagctgccaccattttctggttgaactttttatcataaaaaacggcattatcttcaaagtttaagttgtaagaacggaaatcttgattcattgaaccaactgaagaaaaatggtcgtcgacaatcgtcgttttggcatgtaaaaagccatcttcgtagatataaattttgacacccaagcgagttaattcgttggcataccactgtgtggcgcgataaataaaggggtggtctggcttacatgggatcataattcgtacgtcaacacccgatgaggcaattgtttgccacgtagcaaaaacggcatcatcagggattaagtatggtgtttgaatccataaccgtttgcgtgccaaaagcattagccgcatcataccgttacgcatatatggtgcataacgatcaggcccgtctgaaatgatttgcgttgcaacgtcgccttcgtggatgtttttttcatcaagatcaggaaatagagtggaattgaaacgtatgagctgttgattattagtgatagaggcattccagtccatgacgaaacgctcttgcaaaagcagagaggcagaaccaacaattcttacctgactatcacgccaatgaccaaacttcttttttttgcctaaatattgatcaccaatattaaaaccgccagtccaagaaattcgcccgtcgatgacaacaatcttgcggtgcaagtggtagttaatgcggtaacgggtgatcatgttgcgtgaagtgacaaaaggcaaaacttccccgccagctgcccgcaattgatcgaaccatgctttagtagctcccattgaaccccaggcatcataaattacgcgtactttaactccttgttttgcttttttaatcaatagttgcaaaacacgattgccgatattgtcgctataaaaagtgtagaactcaacattgattgtttccttagctcgtaccatgtccttaagcatgtcatgaaagaaggtttcaccttcggtatagagcttgacctgattatttttagttaggggagcttcttgttggtggttaaaaaagttaattgctatattaccagcctttgaagtgtcagaaggactagtatttttaggtgctttagcaatcgatttttgaacatttctcaagccaatgtgtttttgcttattgatggcaaaaatattttcctgggaaataccccgaccaaagaaggcataaagagtgatcccgactactggtaatactaacaggatgattaaccaagcccaagtggttgaaacggatcttctacggtggaagacaacgtagaaggctaagattgtgttggtaatgataatgattctaacaaagtcatgccaccagatcataaactcctccaaaattaaactacttttttaatttaagaaacttgtcaataatatcgattacaaacggattgtcatgcatccaactatgttcggcgtcatctttaccgcgtacttctacttcttgataaaaatgtgcttttggggcaacgatatagcgaatgctttttgcggaaacaacagagatgaatttatcagtatttgtgttatctaaaacgttgccataaatattcaagactgagatatcaggattgaatttgcgccgattaaaaaacaaataaaggtagtgcgggttcatgacactaggccgaccactttcggtcaaatagttgacgttggggatatcgcccaagtaagtgaccccgtcaaaaggaccagcgataaaggcacatttttttaaatgtgggaacgttttgctgcggtagtgcttcatttccgtgcgaataatacatggacaagctaatgaatgagcgactgcaatatagtttttaaaaccatatcttttagctaaaaagggcaggacgaagttgagataatagtcgatgccatagataccgactattcgctggcgaaaagcaacctgcacgataggatgcttgtcactagtccaagttccttctaatttgaaatttcctaataaatcaacggttacctttaaaaacttgggattgcccttgtcatgagtagcgtgtttcaccatcacgcgagtggtataatcaccgccgcgaaagccatggaaataaataatgggtacttgttttagatcgcttttttcaatgtttgccttattttcaatatggcgcttgtgtaatttgaggaaaattcgcgtgggagcgaaggtggccatcagccccaaagaaatcatgttaaacatgctaggttcttcttggaggtcatgtttatgatctttttcaacttcttcggcatatttttttgtgttgaaaaacatttttaccaccttctctttcttttttcctataataaaagttatgcaataagtatattttaccattgggtaaagattttggaattttagaggtagaaatgaagttttatgcagtcaaaaaaggacgtactccgggaatatatcggacttgggatgcagccaaagaacaagttgatggcttccctggtgcagaatataagtcatttgaacaaattaccgatgctacagattacttagattggaatgcccaaactcagagcgatgtcctgcaaaaaggtgaagataatttacaaaacgccgtaaaaagggtgcaacaaaagagtcaagaaataaaaaaagcaccgcgaaaaaaggcgaagcagtataaccatgttaatagcaatcctgctgacttctttgcggtgacttatactgatggtggcacgcgcaatactggtgtttataagggcggtcacgttaaaaagaccgataaagcagcctgggcttatttaattgaatgggatgaccagaaagttcatggctccggtggtgaatatggtgctactaacaataagatggagcagacagcattgattaatgcactaaaaaagctgcttgagcttggttttaacgataaacatctattatttgttcttgattcgcagtatgtgttgaatgcgattaataagcattggctacaaggctggaaaaaacgtggttggagacgttcttctggaccattggctaatgtggcggaatggcaggaattagatcggttattaaaggaatttcctgatagtacgtttgaatggacgaaaggtcacgctaataatcgcggtaatgaatttgtcgatcatgaattgaaccgttatatggatcaaaaaatgtaagaaaaaaaggctacactgtagccttttttaatttaaaataacgccgccgaacaaaccactaaagaacttaacgatttgatcccacaaattttgtaaccagttgcggttttcttgggtattaaatttattgaagatatttttagctccattttgaatctgactggataatttcgaagcctgttgcttgaagttaccgtccttcaatgcccctgaatcacgaatttcaattagaagattgacaatttgatttttttgattgttgttgatggtgtcacctaagtggttaatattaatttgattgttgacaatgtcgagaatttgactgtcggtaatgttttgcccttgtttagccatctcattcttggcaccggcaaccgcattgttcaattgagcatctgaataaccttttttgtttttattatcttgggtaatcccagacaaggtattcatttcatcttgagcggcattaacttgcttttgatttaatgcattgccatttttagcataggcagcataaactccagctaatgcccctgaaccatcaattggaatagcgctagtaacataaatgttggcatcgctgatgccggcggtcagggctgcgtttttgtactggttggcagtaatagtcgtgatattatttttaccatcgtagtctaaaattttaacgttgattccgctgcctgagctggtcttttggatcatcgcactggaccaaacaccggatgaagtggtgaaattatcaccagagggatttaaatatttaaccagatctgagccggtaacagtaattgtttgataattaccaccgtttagtggtgcagttaaggtctttaatgtaccttgtttttgtgaatcagttaatgatgtacctaaggtaactacaggtgtatcatcatctgctaatactggcttagtaaatgagatcatcgcgaccacgcttaataacattgctgtgagtagtgtgataaatttcttcattttttcttcttttcttcctttttgatcgaatatttattcttgtaatacggaacattatactaaatatttttcaaaagtgaattaaacaacacgtaaaactttcttaatttcgaccttattattgaagatggtataataaagagcaacaaagggggacaatatgttacaagtgcctaagttaaccatcatcatgcctgtttataacacggcgcaatacttgccacgtgcttttgatgctctgcttaatcaagttgacaagagcttcaaattgcttgtagtagatgatggctcaacagataattcggttaaggtagccgaaagctatgccaatcgttttccatattttaaaataattaaaaagaaaaatggcggcccatccgatgcacgtaatgttgggatgcagtatcttgacacaccatatgtcacctttcatgatggtgatgattgggtggatccaggctacacatccttttttattcatgcttttgaaagtcatccagatgtcagcttagtatcatgtggctattggatggattatcctgacaaaaagcaacgcgttgttggtcgaccagaaggtggctatttaacgcgcggtgaaacttatttgaagttgactaatgtctttagctcaccaatgaaaggatatagctggaacaaggcctataaaactgccattattaagaaatatcatttgaagtttgatagggatatttcactactggaagatcagatttttaacgttaaatatatttctgtggctaaaggcgtctactacacgcaaaaaccttattaccactactggcagagaaagggcagtattattcaccagcctaatattaaaaaagttgcggataatttccggggaaattaccgggtttggagcaaaattatcagtacaatgatgaaagaccgcgaggaagaaaagatgcgtaagaagttagagcgacagcaggccttgcgtgatagtgaataggggaaaacatgaaagaaaaagttaatggagtcgaaatttattatcataagttaggtaaaggtgagcctttgcttttactacatggacatcacttagatggtggtatgtttgataaaattgtggctccgctttccctttattacactgtctatgtgcttgatatgcgaggccatggtttaagtgaaggcgacatcgctgaacactacaagaccgaagtagaagacgtctatgcctttgttaagcaagtgggcattgaaggctgctactgctttggctttgacgcaggtggccttgttgccatgatgctggcggagcaatatccgactatttttaagaagatgattgtggccggggtcttcgttaacgggggcggaattcgcccataccactatttaactgaaggttttcatcgtttcttgaagctggaccgcgatagccgagtggaattgaccgaatcctttatttcagttgatgatttgaagaaaattaaaacgccgacgctttgtgtagttggtgaaaaagactgggttaaggttgagcatgtgcgctggtacagtcaatttatgcctaacgcgcgactagtgatcatgccgcggcagacgcataacagttacgcggtgcgcagtttgaagttactggatttgattaaaggattttgcagataaatgttgtaggacatctgagaagatgtccattttttataggtttggtaaaaaaggacgtaattgaaatgacgattggtgaagcattaaaggaagaacagaagcgattaggcctaacatctgaagcaatggctgcaggtgtaattacaaaagggacctactctaaagtggtcaatggtaaactgcgtttgagtagtgatctgttagttgaaattctttttaagcataacattgatattagtgatttttttgaaatgataaagagtacttatatgccaaaagagaaattaattgaggaaaaattgttttctgaaatgcaacaagcattaaataatcatgaggttgaaaaggcagaagaatgtttgacaaaaataaagaatcaaacatctaataaatatttacagcaacgagccgaaattacagttgcttacttaacaaatagtactgataaattaagtaaaaattttaaacaagctgtagttgatgagttgaataatcattctaattgggtaaaggatcttgatgcgctgagattatttaatacagcattactaattctttctagtgaaaaagttgaaattgaaatgaatctttttttcattaaattaaatcgtatcaaaaagatttctgaacagatggaagagagatatgcaattttatgttgtaattacttagattggaagtaccggcaacaaggtgaagtaaatgataatgttaaaaatgctttgaaatatttgagcgatcttaagctaacagctcattttgagagctataaggtttgtggaaagtattttggatatttatttaacaaagaaattgatagtgctaaaaatatgaggaaaagtttacttgcattgggaataactgttggtgttgaaaattggcccgtttaattttaatagtttcgtataagaaacattctaaaagctaaggcataggcaagtgtattatcaaataagacaaaaatgaaaggagatttctaaaatgatttactgggaattcccaattcttccagaaaactaagaatgtgttagttgaaaaacgtgttttgcatggaggtttaaagatgcgtagaaaaaattaggaattttgttagcagcaactttgttagctacaacagtaactaatcctttagctgaagtggttgctgcagatgcagtacaacaacccaatcaaaaaggtattagcagtgaaaaaaataatgatattaagttatcacaagaacaaattgatcaatttgataagtttgttgtagtaaaagacaacagctatgtcttagattcaaaagtaaatcaaaatttttcaacaaatgaagttttagtggtaaaagaaatgctaaatacttcaaatcgagaagtgaaaaacaataatttaattatcgatccggataccaaagaaatccttgatcaaaatgcaagtccatttgtaattatggcagcgtataataaaaattatacaacgaaggctttttggtggggtaagcgatattactttacaagtaacatcgctgtaaccagaggtgctagatactttagacatatagcaagtttgagaaatgatcaatcgttgtttttaagtgctttaggagattccattgcgtatgcttctccgtatgctacattagcagctaatgtagcatcaatgggagtaggttatgttgcgggacaatataatggtgctgcttctgcgttggtaagctataataatagacatagacataatcaaatttatttggatatgaatagaacattccaatactctcttcatgtcttaaaacaaaaaggaaaaatgtatgtgggtaattttaataatcaatgtaataattgcaagtattgcgattattgcagggtttaataatcgagcagaagcatttagtttgttcaatgctggtgtagtttttgtggcttttggcattgtcttacttttaggcgcaattccggtttatcgcaattttgatacttcatcagtattgatgtttgtagctggcatattgattgtgttaggcataatcatgttaatcgttagtgtaattgctagatcgactagaaaaatcaatctacaagatttggcaattgcattaatggtagctgcagtgtgcttagtatatttcattcataatgcaagcttgaactttgctaacttattagtgcctgaattagctttaattgtagggttaatcttgcttgtttatccaaaacaaaagtaaataaagttcttcatctggtttagggactaattatgaaatacagaatgcaataattcatgctatagatgaatgcgttggatcatataaaggtcttttatttgatgcttttcatggacaaattaattattctgagctaaatagttcaaaggttatgaaccatattaaggagacaaagtcgaacacaatttatccggactgtactttaaatatgcaactaaaagaattaatgaaaagaacagagacttatctaacaataattaattctaaagatggatatactgttaaagcttttagtacaaaattgcaaccagaaactttggtaaattctactccgttaacctctagattattattacgtactaataaaccattgattaggggatgcatgccattctggtaaagagaaaagaggcctagtatatgagaagattaaaaacagcagtattaagcgatttcttaaatgatttaccattgggtgcattcattacatatgcatattggtatgcttatcaacaaactcataatcaagggatagtctcaatgctgggaactattgccatggttgcactgctacttgcaatttttggtggctacatttcagataagcatagtaagatcaaactaatgcgctttttaattttgatgagattcatcttcattgctttaggaacacttttcttggtatttaaacctgaaatgagtgttgcagtagtttgttttgtagtaattgctagttcagtaattaatattatttataatcctttaactgaagcatttgctcctgcattgatagacgatgataaagaattaatcaaagcaaattcttgggtttcattagcaaataatattgcgacaattgtctcatcgggtgtcgctacaatttttgtgacaataaatcaaccattgatttcgctgattattcttttagtgtcagtaatgatatcttatattctcttaggatttataaaaccggattcagctccagctcatgctggtaaaatcaaagttaaggaaatacttgataattttatagatgggataaaattagtagggcataataagctgattatgttgatgattccaattgcgcttatagttaacttctgtttctatgtgatttggttgttgatgccgaagtttgcaattacggtctttaatcaatattggtttgtttacaatggaattgatattgcttatacagttggcggaattatcggtgctttgattttttctaaaattagagacaatatcgattctgctattgtttgtccagcctgtctttccttacaagccgtttgcttagcagtcgtcggtattagctcattactaacacgttcattagtttctgcgattatttgtattgtatgttggctagcatatgggatctttaatagtattttttcaatagtgtatttctctgttgtgcaaatgtcgtcttctaaggacaatacaggattaatgatcggtgcagttatgactattttttctattattaacccaattgcgacagctatgagtgatcctttaggaaatatggttaaattgccacttttgatatttatcttgggattaataatggtcttagtgtcagtattgacttttatgccaatttatcaaagaatttttaagaaatatgacaaattatattcaaagtgaagttgtagacttacttaatctagataagaaaaaattatcaaagtatgataaattatggggccaactttgttcacaaaatcaagataataatgaattacttagtatcattgaaagaactagtccgattttaaatttaaacaatgaatttgacttacatttaccatattcggctactaatttaaaaagctgcaggaaatttagcaataaaaaaattaatatttctgactttacgtggctattaagtaattcttttttaagcaatgaaggtggacatagaatatatggatcggctggtgcattatatcctgttgagcctctcataatttgtataaaagacaacatggtagtgggattgcctcaaggagtatacggcatagattacttgaataaagctttgaagaaggtaaatactaaagtagattttaaaaagttgagtcatagtatttcaccatatactggtcaattgatcagttcaatatttatttgctatatattttctatgactagaactgttgttaagtataattatcgtggtcttagacacatgcttattgaggttggttcgatggctcaagcttttagattaaatgggctagcaagaataaataattttggcgatgtctcatggtcaggttttgatgataaagcattaaaagacagtttgggcttgagaatcatgaaaccagtattgttgcaattttttggaattcaggactataaataatttcttcactaaaaaagacatctcttcaatagaggtgcctttttgtatataatggtggtgtatacgatttttattcagaagaggtaaataatgaacaaggaagaacttcatcaattattgcacccaatgaaagttattggcttaggtggtaaccctgcattaaatgaaaaaattgcggcaattttacaccaaccattgatcgaaactgcggttcaccactttagcgatggtgaaatccaagttaacattggtgaatctgtcagaggttgtgatgttttcgtaattcaatctatccaagatccagttaacgaaaactttatggaacttgaaattgttttggacgcacttcaacgtgcatcagctcatgtaattaacgtggttgtaccatacttggcatattcacgttcagataccaagactcgttcacgtgaaccaattaccgctaagttagtggctaacttgcttcaattgactggcatggatcgtttaattactgttgatctacatgcctcacaaattcaaggtttctacaatatccctgttgatcacttacatgctattccacttcttggtcaatacttcttagataacggaattgctaccaaggaagatgatgatatcgttgtagtctcacctgatcactcaggcgctaagcttgctcgtaactttggtcaatacttcaatgcaccgattgcaattgttgatcaaagaggtgctcgctatgatactgaggttcacgacatgattggtgatgttaaggacaaaaagtgtatcatcattgatgatttgattgatacaggttcacgtatttcttcatcaactaagtcagttttggcagctggtgctaagaaagtttacgttgccgcaacccacgcacttctttctaagaatgctactgaagtacttaatgaattaccaattgagcaaatcgtagttactgataccattaagcacaagcgctacccagacagaatggtcagaatttccgtagaccaattgcttgctcgtggtatcgattatgtatacaatgatcgttcaatccaccaaatctttgacgaacaaaaccgtttaaagtaaaattcttattgataatttgaataaaaaatgatcctcactatgaggattattttttattcaaaaaatcgggtagataagtcataaaactatgtctaaatagtaatgattgatataattgatgtgtgttgtatagaaagagaaagagaaagttagaggaatagactatggcacgacggaaaaacatgaagagacggagagttattctaggtaatactttccatctgatcagagaaaatggaatggataatgtttctttgcaaatgattgcagaaaaatcaggcatttcaaaatccttactgcagtcatactatcctcataaggctaagttaactaacgacattatccgcaatctttttaatactttaggtcaacaagttaataattatgacatggctaatagcaatcttccttatgctagaactaaggcatttatttatacgattgctatcttggggatgcacgatgagggcttggaccgtattatttctgaagcttttgttagcaatgctaccctagataattggggaatcatgcttaatgaatggattaaggaaaatcatttatttgatgacattaacgttgacgaaagcgaacttgagacaggaattgcgtttgtaactagtggtattggccgtctatatcatgatcgcaaaaagcaccatttaacggccgaagctcttgctaactatgcaacgagtgcattgatgttcagtttcttgcattgttcttctgaagaaattgatcaagccttaaaagaaggacatgaaattattgaaactgctgatatggaagttgttcaccgagcaattgatacaatgttcgatgaaggcaaggaaattttcagctaaaggggagtcgccatggttgaaggcaaaagagctgatttgcgacgaatgggttatgagcaaaataaccaatataaacgtttgttggctttcgtcatctttttgattgctgcattgtcattgattacagctacttttttaaatccaatctttatgaaaaaacagattaggactagctataatagggcagtagttgttcgccaagtgaataaaaattatgatagcctagctgatttgattaatgcagatagtgaagataattcaaacttactatcggatacgcaaactcaaccaattgccgaccatattattgattattctttgggcattcattggtttaaggttactagtttgccactggctaatcagattttaagcgatatcgatcaaggaattgctaaaggctcatcaagtggggcacaggaagttaaccgtaaactgaaaaagcagggaactaatgcaccttacgcgattattaaagccttcaatttaagtgtgatcactttaggagcaaatattgctggtttattgtttatcgttaatttgataataattattgttaccattattacaatggtttcgctactcaacgatatgaagtcgcgggctacaattcgaatggtgattcatgatacgatggctgctggcatgtgggcaggtttttggctaattttgatttcaggcttgttagcacttgtgccagtaatctttaatgtcgataatatcgaatttggctttttgcttgagattggcagtagcgtctttttggaatatgtaattgctggggtaattatttacatcatttgtgcgataccatggcaaattatagctgctaaataagaatgagaaaacgtaatctgtagaatgattacgttttttgtttgcacaaagaatcatctttctttataattaaaaaataattaacaaatttcatatgtttatattttaaaagaattgggcgagtttatgaaaaaagctaaaattataaagacttttcttgctttcattactatgctttcgactctttttttgtttaatcagcctgttaatgcagccaataaggaggttgagactggctcagtgatgaaaaaaattaagcagtcgaaagaattagtagtgggcacctcagcggattatccgccactggagtttactaccagtgaaaatggcaataccaaatatgtgggagttgatatcgagttggcaaaagatattgccaaggatttacatgcaaagctagttattaaaaacatgagctttgattcacttttggtagcgctagagacaggcaaggtagacatggttatttcggctatgacacctaatcccgagagaaagaagagcgttgatttttctaagatttattacaagccaagtggcgaatatttcttaattaacaaacgcgatcaggccaaatacaaaaaaattaaagattttgctggtaaaactgtcggtgcgcaaactggtagtattcagtattctttgattcaaaagcaaatgaaacagtctaaggttaaaggcttaggcaaaatcaacaacttagttctggcattaaaatctaataagatctctggcattgtcatggaagaaatgactgctaaggcctaccaacaaaacgacaatagcttgatggctgtgagaagtgacttgcgtgaacaacaagctggtaacgcagtagcaattgctaaaggacaaaatgacttagtagctgctgtgaacaagactattaatcgcgttgaacaaaaagatttgattaataagaaatacttgcctgaagcagctaagtatatgaagacagcgcagaagacgaacacgatgactaaatatattccttactttattaagggagttggctataccatcgtgatcacgattttctcagtgttaatcgggatcatcttagggatgctcttagccttaatgcgtttgtccaagaataaattgctgcactggattgcagtttgctatatcgaattcattcgtggtacgccacaaatggtgcaaattttatttgtttactttggtgttggagcattaatttctaacctgtcagctgttgtagcggggattatcgcaattgggttgaactctggtgcttacgttgcagaagacattcgttctggtattgcttcagtagctaaaggacagactgaggcggctagatcattaggtctttctcaagctaaggcttaccgctatgtaattattcctcaagctttgaaaaatatttggccggcactaggaaacgaatttattaccctgctgaaggacagttcattggtttcagttattggggtaactgaattaatgtaccaaacggaattgattcagacttcgacttaccgtggtgttttacctttattcattgccatgattatttactttatcatgacatttactttaactagattgcttaattatttcgaaagacggatgaaacacaatgactaaaatgatcgatatccaacatttgaagaaaactttcggcaaaaatgaggttctgaaagatatttctgcggaagtagataagggccaggttatctgtattatcgggccatctgggtcaggtaagagtactttcttgcgttgcctgaatgtattagagcgtcctacgactggtaaaattgtttttgatggaacagacttggctagtctaaaggatggtaaggaacttgatcaattgcgggaaaagatgggaatggtttttcagaactttaacctttttcctaatatgaatgtaattgaaaatattaagttggcaccgatgaaagtcaagggtgttagtgaagctcaagctgagaagactggactagccttacttgaaaaggtgggcttggccgatcgtgcaaaacaatttccagctagtttatcaggtggtcaacagcagcgggtggcgatcgctagagccctagcaatggatccggaagtaatgctatttgatgagcctacaagtgctcttgatcctgaaatggttggcgaagttttgaaaacaatgcaagatttagctaattcgggaatgacaatggtgattgtaactcacgaaatgggatttgctagagaagtagccgatgaggtctggtttatggctgatggctatttacaagaaaaaggcacgccacaggaagtgtttgaacaccctactagtgaacgtgcaaaagatttcttatctaaagttttataatcaaaaaggctcaagcattgcttgggccttttaatttactcatctgtaatgatggggtttgataatacgtactgtcttacgaaaaaattttgatgccatcctttttgaattaatgcattaaaaaaggtgttttgattattaggcaaagcagtggcttttggaatgatgacagcacgtaaaatcttgttttgaagtaaaattggtgattgcacatctgtttcgctatttaaattagtggttgcttgattggtcggcgtgttggttgtatcctgctgaacttgataatttgtagtgtcattagtactatcttgcttaaatagcttgaatctgtacttctgcacgcctttaacgtcaacttcatattcatgtcctgcaactaggttagtatttgcgggtgaataagttaggatcgttctaaaattgccgtagccacaggagctgtaattcttaacatgagctgcagtagtaacaactttagtatctaaatcagtgatagtaattgttggcttatttttaatggttctatctgataaatagagcgaccacatgatatttttcccttgaagcaattcaatagggaaaagacgcatgctaggataagcaactaccggctgactagcaggacgaaaagtatcattaatgtttagtactttttgaacggaatagcggtagccatttgtaccataagctgccccaatgcctgtagtggttaaacgacttgaaagtagccaagctcggtgaccggtatctgaaccagttaaattataatggtcagtaattaagtcagtgatcacatccccagcggtttgctgtgaaacattaaagtttaaatttgaagtttcagaagtgtctttagctagcttccaaacaaatttggagatattgcttggcttagtttcactaggtaaaccatgttggttaatgaatgggttagcattaattgcggccattacagcagccgtaatctgcgcgtttttattaagtgtatcagtagtcgagatagcgggcagactgaacaatgatcgatagtaattgatataatctgtttgcgttttaatgtattttggatctaagcgacctaccttaaattttttgcttagatttggctttttagcataaatatttgcggcactataactagttttatcaaggttcgcatattccttttgaaaattatgaacttcgttaacttcttgtgttgtgaatgtcgctgcttgtgtaacttgtccggcgagggggataaataaagttgcggcagcggcaatagaaaatttccgtagaagcattttagactcccttctatggttgtcagtatacctttcattataaactataaccaatgaaaaggctttagtgaaaaatattccactattttgcgcttttctggtattctttgcgtataattaaagattggaacatttaaaagaggtataaaataatgactaaaaaattacaagttggtttgatttttggtggtaattcatcagaatatgaagtatcaattgtttcaggccgcaacatctataaggcaatcgacaaagataagtttgatgtgcacccaatttggatcactaatgaaggctactttgctaatgaagaagaaagcttcaaggttttagatgatccttcataccaagttaagaacccacataaagttaacaacatttctaacttaattgaattagaaaacttgccagaaattgatgttttcttcccaattgttcacggtaacttaggcgaagacggtgttttacaaggtttgttccgcttgatggataagccattcgtcggtgatgacgtcttaggagccgctgtaacaatggataaggaattcactaagatcttggctcaaagagttggtgttccagtcgctgattggatttcaattaagcgttttgaatacgacgacaagaagaatgctaaacttaactatgaaaaggtagcagaaaaattgggccgcgacatgttcgttaagccatctaaccaaggctcatcagttggggttagtcacgtaactaatgctgacgaatatactgcagccttaaaagaagccttcaagtatgacgataaggtcttagttgaagaaactgttcctggcaccgaggttgaaacagctgtcttaggtaacgacaagccaattgtagcaggtgttggtcaaatcaccaatgcaaaaggttcattctacacttatgaaaataagtatgatgataattcaacttctaagttacaaatcccagcagatttaccacaagaaattatcgatactgttagagaaaatgcacgtaaagtttatgcagcaactgaatgtagcggcatggctagaattgactccatgctcaccccaggtggcaaggtagtcttgactgaagttaacgctttaccaggctttactaatatcagtatgtatcctaagttgtttgaagaagcaggtgttccttacagcgaattgattacacgcttaatcgaagcaggtatggaccgttttgatcataagaaaactttgcttcacaagcatgactaaacgccaaaaatatagaggtagatttcaatgacgactaacaagcatgattttgaagaattggctgcaccaaaagcagctgcacaagaattaggaattagtgttgccacgttaagaaagtattctttaatcgtggagaaggtgaccggcaagatcgactattttgctcggactaagcaaaaggctcgtctgtatcatcaaaaagatattgatgacttaaaggcttttcaccgtttatctaaaaatagtggcttaactttgcaagaagccgctcgtcaaatctatgctgttagtgaaaagaaacctgaacctgaaactaaagaaccagctcctaagcccgcttataacagtaccgatgtaatggatactgagcaggtggttaagttgcttaacactttgcaaaagacaatttctaatcaaaatgaggcaattaattctttgcagaagcaattgaatgtcattcaaaagcaaaatcaagatttaattgaagcacaaaagcaattagctgcgccacaagatgatttagataagtttgcggctttgccagatatttctggaattgtgagtgcggatgaacctaaaccgaagagtgaagaagaaaagcgcgctgaagttaaaaaagacatgaataagagtcaagaacaaatgcatgacgagattatgtctaaggcaaaggaaaatgccaagaagcgggctacttcaaatgttcaccgtacactagaagatatgcaattaacggaccaaaaggaacactggtggcaaaaaatctttaagttttaaacaaattgattaagaatcaagagctgacctaacaaaaggccagcttttgttttacagtaggcgtataacaattaataggaagtagaagtaatgaaatttaaatggaaaaagcgctatacgatagcagttatcgtggcaattgtgggagcattattgacggttttgtcctattttgccactgatatttaccacaaggacgacgttgccgtgattaccgatagcaagatcaaggatactttgattgaaaaaagtgaagatgtgtataaaaatgcggatgaaactcgccagcaaattttgcacttaaaagttttatcgggtaagcacaagggcgaaacttacacgactaaaaacgtgtattatccttcgcaattgacgacgcaaaagtatcgtgcaggtcagagaatttttgtcaatatcaagaagggtgatccagcgatcgttaatcctaagcgtgattgggtgttagttttggtagtgacaatcactttagcattgatggtggctgcagtagggaagcactcactctcgctggttgtgtcaatggtaatttcgtggctgatcttttatttgattatcatttgggatgtgcatttgaatggcgcccacattattttgctgtttggcttagctgatatcgtcttttcattctttagcttgctcattgtgcagggcttgaataaaaaaatgttggcgacttggttggcaacgctgctaggagtatttgtttcttttgccttgtgctacgtgatcatgaagttaacgggtgaatcggaaatgaaatatgagaccggtgactatgcaacgcaagatccacgaggcttgtttttagctcagactttgattggaattctaggtgcagtaatggatgaggcgaccgatattatttctagtttgtatgaattaattcaaactaaaaagaatattacgatgagacagttgattcatagtggtcgaacgatggggcaagaaattatgggaccgttgattaatgtcttggtcttaatttttattgccggtgcgctgccagaaactattttgtacttgcgtgataataatactttagcttcaacttttggctttactctgtcgctgggggcaacgcaaagtgtgatttcggcaatcggaattgttctgacggttatttttgcgacaggatgcagtttgttcttcttgaaaaaacgcgattggaagagtttgtttaaaaaagaaggtgagaataaatgagtacattatttgcattgatcgttgtcttagcgattttaatgacaattgtcggtggtgaaactggaattcgtagtttttttagtgtgctaattaatacgattctattgatcttagtggcgatgctaatatcatggggaattaacattgcaattttgacgctgatttttattcctttaaagctagttacgattatctttttaggcactcatgactatacggtagcaaagaattcattttattcttccttcttagtgtgtttgattattagcctctttattttgggttgtcaatacctggctcaagctgcaggactaggaccagaggcaggagagttattggttggcttgtcgcagatgccgggcttgagttatccgatgattgccgtgacagtggcgattttctcaactttgggtgcaatcgccgaagccgcggtagcaatgagttcgggcttgctagaaatcaagaagcataaccctgctatcggtgaagaagagttgatggcttctggtacggctattggtaatgatgttttgggtacagcaatgaacacgattttatttgggatgttcggtagttttttgtcattattcttatggtatttccgcttgcattacacgattggtgaagttttaaatgaaaaactttttgtaaatgaagcgttaattatcatgtattctttgattggggttatattaacagtgccactatcatcatttatgctatcaagaggaatgagcaagaaaggaccaaaacatgagagtagaaaatctgacgctgactaactttaataatcgtgaatatcaagttcatacatatgtgctagagcctaatcctgaattggttgagcaaaagcgcccgctagctattgtagtaccaggtggcagctttaatcacttatcaaaaagagaaggtgaacccgtagccttagcatttaacaatcaaggcttcaacagtgtggtgatggaatataatttagtacaagatccaggtaaaatttaccctgatgcggggttagatgttctaagtactgtgaaatatttcagagaccacgctgatgagtatcaattggataaagataagattttaacagttggcttttctgctggtggtcatgtggtcagtgtagctaataacatggctttaaataaaaattatcagacaaagtatgattttgataagactgatgttttacctaataagacaatcttaggctatccgctgattgatattaaaaagattggttttccgattccagaagatcaaaaagcaaaaatgcctgtagaggaagatattttggatagtgcattaggtgttacacgtgaaacgcccgatacatttattttccaggcatgggatgatccggtggttttgatcgaaaattcgattgaatatattggtgctttgaataagaataaggtttcagcagaagctcatttgtttaaccacggttaccacggcttttcattggctcgtcacaatgtggaaactaagggtcaagattggcaggataatccgcacgcggcgcactggtttaacttggcaatggaatggctaaagagtgagtggggcgaatgatgtgaagcataaaaaatcttctaaccctaatgacaatatctatcacactatcgtcaagaatagaaaaattgaccgaatgattatgccttttgaagcggtgtactgcgtgtggctaatcattacgctggttcttaactttaagctatttgcatactcgattgacgcacaattcgtgctaatttctctatttttcattagcggatgggtttcgtcattagttaagaatcattgcatgaagaaaagtagaaaataagataagtaaaaagagttctcgcacgagaactcttttttattagaatcatttactttttatctctaaagaaaataacttccttagcagccacaaatgggccagatgacttataaacctttaatctaatagccttggtatcgacatttcttaagccaacaaccttattcttgctatcagacttccaagtcaagtgatcgccgtatggcttaaagttaacgccatcgcttgaaagctcgacactaacttcaacaggatcgccttggtgatcaatctttctaggtacccagaccattcgactcaagtgttccaaatgattaaaggcgaagtttaattcaagtggcttgtcttcgctgaccccatcaatggtttcccattcacttgctaacttcaaatcagtcaagtaatcaattggatgatccttaggactagctagactgctcgtgacatgaatgtcattaattgcgtagttcattggatcgggcttggtaattgcgccaaacggatctgaccattctgaaaccttattaccagctacataacgcaagcgtagggtgtagcgggtatttggcactagttcatggaaagtgaacgaattgccatcaatgccgtcgtgcaagatgccgttaacttcaatttgaacttgatcggttaattgcggccagactaccgtcaacgaatgagagctggtcttgtctggatctaccattggttgttttggtgagcgtaatagtgaatccgtaatggcgtgaaccaaagtttcattgccatatctgaagtttctaattgtaatttcaatcttagaatcggtaatgtcgcgtttagccagcttaatttgtaaagcagtttgtttcttttcttggtattgatcaaactcaggcatccagctgtaatttgtgttaaagaagaagccttccttagcatgggcaaatgtatcaacggtaccgtactcctgcattgggatttccttgtcgttgattttaacagtcaaaccatcaggataaccgtcacacatgatgttcaagttggtggtgttttccgtttggaaagtattgaaatcgccttgagttgggtcgatggtgatcgtcaatttgcttgcttctaaatcactcgtgatttgtgtagctacatggtttcttgaatagtcgttatagccgttatcatcgtaagtaaccattttactcttgccttgagggtagaggacataattgcgttcgccgaggtcaaaaatagcgccgcctcgtacaaatactggtaaatgccaggatgggtaagactgcttattataaacgcgtccgcccaagtactttttgccatcaaataagtcaacccacattgttctgtggttaggcaagtaaaggttgtcttttcttgaattgccattaccatcttcgcgaccgttaacaattggcgaaatcaacaagttaggccctaacataaattcatggcctacctgtggggtgtagttgacttgttcatgtggaaattccaagaacaatggccgcaagattggctcaccgacttgagcgcggtagattagggtatataagtaagtctgcaattgctcacgtagttttaaataggctcgattaatttgcgtcatcttactattgtaagcaaatggggtcttactaaatttaccttgatcgtctaagttgaacaggattggggtaaatgccttccattcaaaatcacgaatggcaatttgagcattaccaccgccagcggtaccgtcaacggcgctgccaactaaaggctgaccagaaaggctagctcccaaaaagccagctacttgcgttggaatgttttccaagttgccgccaatgtcaccaaaggctagcattgttctattttgactaccagcaataccagtattagagaaaatcaacggccgcttacgcttcaaattgttgcgtaaaattagcgcatcatttttcaatacttttggatcggttgtgtccgtttgaataaaggtggtatcaggtgaagccttcggtgtgttgttttgactccaaagaccagcgctaacgtcatgtatagcggcgtattcactgaagctagccatggcttcttcgttgatttcttgcacatcatagttaggcacgatccaacttaatttaaaatgctgcttctggtagcgatcaaccattgcccgtgctgagaattgatattcttcttcgccgttcaaggaacctttgccactagcatcttctggcttgttagttctggtgtaataattaccgtcttcaaacatgacagcattacgttccttagcttcaccaggttgccataaggtagttaaaaagttgccaacatgacctaatcctagtgcatatttaggtggcatcagcggcttacccgttaacatgtaatactttgccaaaatatttttgggtgaattacctaatagataaaaggtatcaaacatgttggtgtcgtgcttcaagatagtggcatccggattgcttttaccaaagtcataattgccagcactctcagtattgcgcaattcaccaaagccggagttagcccagaagaatggcactcgggtcaaaacgccgcctttaccggtaatcttgtcgcgcttgattgaaatgatttcacctttatgactgaagtagccgttctgcatcccgccaccaaagtaaaattcattcttgtgttgcttcaaaatttcggtagtttgatcattgcctaattcaagtggactcagctgaaccaaacgattgcggtgcagcatctcgtcaaagatgctcattacggctggcttttgttggaaaataagttgataattgccagacttaatgattaaggaatcgctggttgccttaggctgtgatttttcaaaatagtcattgttgaattgagacaggtcaacaaaagatgagtgattctcgtcaaacttcttagctggatcgagaaaatatctgaagatcccgtcagctaaaatataaagacgagcaatatcgccggtggagtagtgaagttcataataatgatcacgtttgttggcaccgataagttggcctagttgatgtctttctatttggttttgtgtcatatttattcttcctatttaaacttgctaccttatattataactaaaaatcaaaaaacttcttaagcaattgtactaaaactggtatttaccaattttgttagatataattaaattaacaattacgatttagacatataaagaaagaagatatttatgacttattacattcatgcagataaatttttcttagaaaacagaacagaaaacggcggctatcttgaagttcaagataatggcaagtttggctttttctatccagaaagcaaaaagccaaaaggtaagattgtcgattatgctggcaaatgggttgcaccaggattagttgacacccacattcacggctcattgcgagaagatgtaatgaagagtgactgggaaggcatcaataagatctctaagggcttgcttagtgcgggggttacttcatggatgccaacaacgatcactgccgcaagcgataccttaactagaatctgtaagatgtttgcggaccatcaaggacaagaagaaggggcaaagattcaagggattcactttgaaggaccattcttcacggaagaacatgctggagctgaaaatcctaagtacatgatggatcccgatattaatgaatttaacaagtggctggacgcttctaacgggatgctgaagaagatttcaatggctcctgaaagaaaaggttccaaagaatttattcgtgaagccgttaaggaaggcatagtagttgttttgggccactcaagcgctagttttgaagaagcagtcgcaagcgttgaagcaggtgcaaccatgtttactcatacctttaacgggatgcctgatccaagccaccacacgccatcaatttctaatgcggcaatggcacttaataatgtgaccgatgaattaatctgtgatggccaccatgtgcaaccatgtatggctaagactttgattaatgccgttggtccagaacacattgccttgatcactgattgtatggaagctggcatgatgccagatggcgactacatgttgggtgaattgccagtctatgtaaaagatggcatggctcgtcttaaggacggcgacaatttggctggatctatcttgcaattgaagcaagcagttaagaatgtagttgactggaacatcgttactccagaaaaggcagtgatgatggccagctatgttcctgctaagagtgctcatatcttggacaattgcggtacaatcgcaccggataaggatgccgacttcttgattttgaacccagatttaaccttgagtgagacttacctaaatggtgaattacgttataaggcttaatttgttagtctagttttaaatagtcctcattagattgagggctattttttgaccctaaattttggcaaatagtatacaattaataatagtaaagtaggtattatacatacgaggaggaatttactgtgccagatggaatcagtcaattactagtactttttatgtaataactttcaattaattgaataatttgtactcttattgattaaagaaaagtatcacatatgtttcatgaatctcgtctagccaagtaggtgagattttttattatgtttctatgtaatcgctttcaatttagaaagaaatatgctatattatgagtgtaaagaaattaagaaataaaaaatatttaaataagtttaggtaaaaggagacaggtgagttccgatgggcacttgagagtagaaagtcagatattatagaaaggtttgtgataccaatgggcatcgtaaattgaaaacaaaatgtagttcaataatcatcaagtgatattaatgtacataagaggccgtgaaattattagtaggcatagaataataactatttgatgaatcacttggattaggattaagaaagactttcatacatgataaatattaataagaaatgacctttcgctggaatgaagtatgcgaagggtcatttaattttggcttgaaaacgtttggtatttagcattattgttatttgttaaatataatatgaagtacatgtactaggccgatagagaggaaagttatgacaacagactcaattaattttaaaatcgatgcagaaagtaaaaaggtgatgattaaagaattagcaattattaatggcttaattcctgatgatgataatacagtagataatctaaatgattattttaaaaacttaggaatttaatggtttattggtcttttatctgatgtagtaaatcatgatttagtaagtcgtaatttagtaaaatataatttagaagatggtgatcttatgtttattggacgaaagaaagaacttactaaattagagcaatttaattagcgtggctaaaagatattactacttgttttcaaagtcaggctttacggattcatgtacggaactggcagaacaagtggggtgcaagttgattagttttgatgaaatgtaatatcatttttcctattatttttatctgttgtgatcggagtaagtactggtgtttaaaaaaggcgataatgtggtgttaattctaaagcctaatggcaatcttgaaatgaaaaaagaaaaaactaatttttgggacgaagtatcaaaaatgtctgctaaagaaaaaagattgcagattgaagatttgggatatgatccattagaacaaagatcaaaaggtagagaaagaattgaggattaaaagttagaaaaggttcttggaatcttttttgatgaatttaggtaatctgaaaaaagaaacggcaccgctagataattagcgatgtcgttttagttatgcttagctatattagtatgtctgcttaatttatttaataaactgcgccgtcgtagaagttgtaacgagggcggttgaagtcgaagtcttttaattcactgatcttaattgcgttatcgcaaacaccccagctcattaagttgattggcttaccgtaatcttcatcaggaattaccaacaagatgtacttgccttttgaaagggcatagccaagttccattcccagaccaacatcttcttcttcaggcaagtaaacgccaagcatgatgtcgctggacttaatccctactaagtcgttatggtaggtagctgatgcccattcaatgtcgtgcaagtattcagggtgttcatcaacgcggatacccttatattgattatcaagaggtacgtagctgttttctaagtcaacggtaggattttgctttagagcttccattgcttctttgtaagccttattttgcttttcgttgaaccaaccggcaccaaagtataaagtttttgtctttgccatatttttctccctttaaaaatgatttaccttaactttaccatcttttgggttgaaaaaaacgtcttgttaacttatggtgaaaatgttaattccacattaggaaggaaaaatccaatgactaatcaaaatctttttgcacctgatgcagtatttatttctaatcaaactaagcaagatttggtttttaaagaagtttacgagcatttacgcgaaagtggctatgttaagggaaactttttaaaccatattgtcgaaagagagcataattttccaacgggattggatactgcaacactaggtaaaaatattcctaatattgcgattccgcacaccgagggcgagtttgttaacacgagactgattgttccggttgcgctgaaaacgccagtcacttttcataatatgattaatcctagccaagcaattgaagttaaatttttattcatgcttttagataatgacccagatgggcaagctgcattattagctcaagtaatggattttttggctaatacgccagccaacgaattgcgcgaagtttttaattttactgatcctagcgcgatttatgcctttttagagcaaaaatttggtaagaaaaaagaagactagtttttagcctttttttttctaatcttcaagataaatattacgcaacttcatgatgtctgcacttgagagcttcattacatcgcgtaggtagttattaataccgccatattcatcgtttagtactttaacagcatggtcaaggtattcactgcggacactctgaatgtcacgaatcgattgcagcacattttcatttttaccattttgacgggcatgttcaaccatactgtcgacgaaatccttggtagtgatgttggttaaaagatagtctttcttaatcgtatttagtggtacgccaagagcagataatgcaagtaatgcaccgaagccggttctatccttgcctgcagtacagtggaaaataacactttcgccatccaccgtattttcaagcaagacatcgaagaacttgcgatatgccttttgtgcaggttcactttcgatcatgtcttcgtaagcataatgcatgtgattgaagccaaaatcagcgtcgtcgtgtgcttgtgtatctaagtcagtgatactcttggatgaattggttaagtcctcactgaagacgggatcatagatatattcaacaccatctggcacgcgatcgggttgattatcaacttcttctttacttctgaagtccacgtcatatttaacgccgtaatcagttaaaaactgcttatcaaatggtgaaagatcagctaagttaccggttctgagcaacttgtgcatcttgatttttttaccgaataaagtttcataacctccaagttcacggaagttgcgtccactagttactccgattaattgattagttaattttttagtcaaaaaaattctcccctttctgttaatgaatgtcatgaatattattttagcaacaaatcttcaagcaaacaatcaattaaaaagtaacggctttcaaaattatgctaaaataaagggtaagtactagtgcaatttataggagatgaattaacgtgacagataaaacaaaagaaagcattttagttccagttgatggctcagaatcagctgaaagagcctttgacaaggctgtaaaagttggtttgcgtgatggtgctcatgttgatgtattgaacgtaatcgatacgcgtcaatttatgggtgaaatgcaagacactttgatttcaggagataccatttaccaaatgactcaagattctgaagaatacttgaagagtttgaagaaatgggctcacgataacttcggttttgacgatgttgattatcacattcgttatggcagtcctaagcgcattatttcttacgacttcattaaggaccaccacaatactttaattgtgatgggtgctactggtttgaatgcagttgaaagaatgttgatgggttcagttactgaatacgtaaaccaacatgctttagctgatgttttgattgttaaaaccgatatgggaaacaatcctcttaagccaactatgaaaaagaactaatataagaataatcgccaaatgattctaaattcattggcgattatttttttgaaaaaagttgcaaaataccttgatagaacacgaatgtttctggtattattttatcaaatgaacgtgggaacgaaaaaggggagtgaaagataatgtttatgcaatcagaacaatttattgcaaaggatgtgtctttcgctcgtaaagacgttttttctgttcgtttagttattagaaacgtcattaattaggcttaattattgatcgcctttggcgacccgtaattaagtctttttttgtgatgtagagtagtttgttttatcactgtgtatttatgtttatggaggacataatgaaaagatttagaagaatcttggtagcagtagttgcacttcttgtagcagtagttgcaactgcgtgttcaaacaagagtaatagttctaagggtggttataccccaaagtcattaactattcaatttgtaccaagtcaagctgcaactaagttgcaagctcgtgcaaagcctcttgaaaagatgctttcaaagagattgggtatcccagttcacgtttctatgtcaactgactacaacaccgttgtggaagctatgaaatcaaagaaagttgatgtaggttttcttccaccagatggttatgttttagctcacaagcaaggcgcagccgatttgcttttgcaagctgaacgttacggtgttaagcaaccaggtggtaaagcaactaaccaattagtaaagagctatcgtgcagaaatccttgttaagaagggttcaaagatcaagaactggaaagacttaaagggtaagtcaatttcagtacaaaacccaacttcatctgctggatacgtattcccagttgctgaacttaagcaaaagggtttggacgtaactaagagttgtaagttagttactgttactggtcacgaccaagctgttttgaacgtattaaacggcgatactgatgcagccttcgtctttgaagatgcacgtaacatcgttaagaaggacaacccaaagatcatgagtcaagttgttccaatttactttactaagccaattcctaacgacactatctcagtaattccaagtatgtctaagtcattccgtaagaagcttgctaaggcattcatctctgtagctaagtcaaaggaaggtaagaaagttatcgaaagcgtatatagccacgaaggttacgcatacgcaaaagatagtgacttcaacgttatccgtaaatacgacaagatcgttgaatcaactaagaaataataaatttaattaagggagtttgacgattaaatggcagataagccaatgattcaattaaaagatgtttccaagatctacgacaatggtactgtaggtttaaagggcatcaacttaactattaataaaggtgaattcgtagtagttgttggtttgtctggtgctggtaagtcaactttgctacgttcaatcaatcatttgcatgatattacttcaggcgatattttgattgacggcaaatcaattacaagtgctaaaggcaagaatttgcgtaaattacgtcgcgatatcggaatgattttccagaactttaacttggttaagcgttctagtgttttgcgcaatgttttggtaggccgcgtagcttactacccaacttggaagactacttttaacttattcagtaaagaagataaacaaaaggcttatgaagctttacaacaagttgatttggccgataaagtttatgcacgtgctgacgagttatcaggtggtcaacaacaacgtgtagctattgcacgtgtgcttatgcaaaatccaaagatcatcttggctgatgaaccaactgcatcacttgatccacagacttcagtgagagtcatgaatgacttgaagatgcttaatgaaaaatacggcatgaccgtagttgctaacttgcacagtatcgaacttgcacaacaatttggtgaaagagtaatcggtatccgtgctggtcaagtagtttacgatggcaagatgaaagatactcctaagtctgtcttcactaatatttacaatggtggtaacggcagcgaggaggatgaataatgcctgaacaagtaaatcaattgcctaagcgtaagttcaaagtaatgaacttggtttggacaatcatcatgattgcaggactatttatttcaatcaatgttactaacacgcacattagtgtcttgtttgaaaactggaaccaatttgctgacatctttattcaaatgtctcatccagattggagctacttgaacgttgtttggcctaagttgattgaaaccatcaagatggctgtcttgggtacggtaattggatctgttgtcgcatttatctactcattattgattgcccgtaacatcgttaagaacaaggctgtgactggcattcttcgtgtgatcatgaacattgtcagaaccattcctgacttgcttcttggtgcgatcttcgtagctatcgtaggtatcggtccagttgctggtatcttggctttagcagtcttcacctttggtgtggttgttaagttgttctacgaagcaatcgaaacaattgatccaggtccaattgaagctttgactgccgtaggtgcaaacaaattgcaaattatccattacgcagttatgccacaaattatcacttacttcatttcatatgttctatatgcatttgaaatcaacgtcagagcatcaacagtccttggttatatcggtgccggtggtattggtttgaacttgcaacaaactttgcaggtcttcaattacgctcaaactggtacgatcatcatcgttattatcgtagttgttgtcttgatcgactacgtttcatctaagtcacgggaggcgttaatgaaataatggatactacaatgaaaaaattacccgctaaacccgttgaccgtaagaaacaagttgcacattggctaattgcaattgccactatcgtaattattgtttggtcatgtactggtattaacttcggtggtattaaagccactgctggtcaaattgccggtgcaatcttctcaggtattttccatcctgactggagctatgtttacaatggctcaggtgaagacttggtctcacaattgtggcaaaccatttgtatcgctttcttaggtacattcatttccgcaattatttcattgccatttgccttctgggcagctcacaccaagcacaagcattggtacacttcaagaatcggtaaaattgttttggcaattatccgttcattccctgaaattgttcttgctttgatgttcatcaaggccgtgggtcctggttctgcagccggtgttttggcattaggtttccactcagttggtatgcttgccaagttgttctcggaagctattgaaaacttggaagaagggccaaacgaagctgttattgcagccggtggttctaagttccacgtaatcatgttttcaactatgcctaacttgatgccagctttgatttctaacaccttgtatcgttttgatgtttccattcgttccgcatctatccttggtttggtaggtgccggtggtatcggttatccattgattattgctttgcaatatcgtcaatgggaccgtgttggtatcattttgctagggatcatcattatggtggtgatcatcgactggatttctggttggatcagaaagaagttagtctaattcccaaaatttgaatattaaagaaagcgaagacgaaaagtcaatgtcattaagttaagacattgacattatatcgacagcttttaaagatcgaatcattttgattcggtcttttttctttttaaaataaaaagtgagcagagtttatttgcctttctgctcactttcgtcatattatctggtctttcatagaaagctgtgcctcttatgaaatcccttcactcaaatattttaaagctgatggatagtattatcaataaaatcgctgacaacattcacgatttctctgtatctgatcaagcttttactcgctgtcgtaagctcaattccactgatttgattaagttaattcttaacatgggagctggcagcctgaattcggaaatttttcatgcttttcctgacataaattctagaatgactgcttcggcttttgaacaacaaaaggctaaattaaagcctgaatgctttaaagaaattatgttagaacttagccgggcaaataatgtactgcaattattagataatcaatacttagttgttgcgattgatggctctgattttgatcaaccttttaatcccgaatcagaaaatatttttcgaggtaaagatggtcgaatatactgtcaacttcatgtaaatgctctttatgatgtcttgaataaattatatttagacatggttatccaacccagacaaaaaatggatgaacgtgaggcagccttaactatgttaaagaaattagcccaacaagaaaaagatttcttagtcctgatggatcgtggctatattagctttaatttaattgaaaattgcaatcgattaaaacattgccactatgttatgcgatcaaaatccggagatggtgcttttaaagaaattgtagctatgtcgaatcatgaatacgatattgacttatcatgcagagtaacttcgtcacattattattatgtcacccataaagatacagaaaagtttcttcacctgattcttcacaaaaagcatcactataaagctgttcgttcaaaaaataccagagatcaacgctgggattttgaggatatgtgtgatgttagatttagagtttgtaagtttagaatcaatccaccaggttcagacgatgagtgggaagtcctcatcaccaatttatatcgaaatgaatatcctctagctagaatgaaagagatctatcatcttcgctggggaatagaaacttcttttagggagcttaaatatgacttaagcggcatacagtttcattctaaaaaagatcaatttgtttatatggaaatatacgcccattttgcaatgtataatgccgtgagtttatcaataattgcgagctcaaaaccgtatactcagggaaaatatcaatatcaaatagattttaaaatggcctgttgtatctggcgacgatattttagtataagtgataattcagataaaaacttcacacaattactgctggatgtggcattttatttaacgcctattcgaccaggaagaaaagataaacgaaatctaaaagttaaattagtagttggctttccttatcgtctagcagcttgaactaatttaaacgactatcttaagatggcttatttgtgctatcaaaaaagacatttatcgaataaaataattcgataaatgtctcaaaaagtgtcatcagattagtcaatgtcttaacttaatgacattggacgaaaagtccccgcttttttgttagccgtgaaatttaaattggcattgattaagatgatcattaattaatccgattccctgcaagtaggaataaatgactacaggtcccacaaaggaaaaaccatcttttttcatttgtttggatatcttctgcgataggtcattagaagcgggaacgtcatcaaagctggcaatatcatgcacaattggagtaggtacaaaattttgtaaatatttggcgactgaacaatatttttgttcaattgccaaaaatgcccgagcatttttaacagcagcattaattttcattcgattacggataatgcccttgttttgcattaatgactcgatatctttatcggtcatctttgcgacttcagagatctgccaatttttgaatgcagctttaaaattgttgcgtttatgcaaaactgtggaccagcttaaacctgattggaaaagttcgagcacaagcatttcatacaaatgtgactcatctagattaagtttgcaccattcatgatcgtgatactcctgtactgcttcgtcttttgtatcgccccatggacagcgaataatttcttgattcatatttttctctctttctatgtaagtaatgttttacccctctattatttattacgcaaaaaaatgcgattattttttgagaaattatatttttatgtgcgaaataagggttttaacagctttttttgctataattaggtgtgaatttcgaggaggatcctatggaaaaattagataccatgatgttggctgatgatttagccttatcacaagataaaattttaaatggcgaacaagactttggcgctgaagctgtttacaaagtaatcgataacttgggcgttttaaataacccaatcaaggattacttcgacatgactgaagaacaatattatgaagctgaaagcgatcacaaactaactttgatcaagatggacagtaagttgactgatttgcatgatcgcattttaactaaccatgttgatggttttgttgataaggacgagatcaacttaacctacaatcatgagaatctatatgaagatgatttatacgatccaactactgattatcgtgaaattgtttacagcttgaaagttattggtgcggttcaagcaattgcagctaaggacttgcaagaagtattgtctaaagatgctgtattatcaattggacttgccgcatatgctttagcacacaacgcataaattatttgagtcggctggtaagcggccggctttttttgcttttttgaggcgaaaagatgaatttgtttaaacacacaaagggaatagttgatcgaatcgttggcgccaaaaaacgctctgcaatggataaagatagtgaattgcttgatccgatgcaaaaatatactactgttggagaatatcatgttggtgccgttgatggtacgccgcatggtaaggactatgttttaaccgtttatcaagacgaagacggcgttttgcgacaagcacttagtccagagagtacaacgaaattagcaccggaatatttacgcaagtataatgcggaactaggtcattttcgtgcctttcataataagaagacagggcgccgttattgggtggaaaattacttggataatttcactacggaagtgaaaaagcatattcgcccaggcactaattcggtcaatatcggtgtaattacagatactcactttaaagataaagatagcagcgatttttatggctttaatgggctgcaacatgtgcaagaattttcttatttagatcaatctggcttgctagatttaaaagtccacttaggtgactggatcgatggctccgatgctggcctggtcagtgaaagtgaattggtcaagctgaacaagtcttttaagtcggatcaggtgccatatttgagtatcaagggtaatcatgatgaaaatgataagtttgatgaacatcatgatttaaaagcctcatttccagaaaatgaattcgaaaatattatgtggcccgatatgtaccggcaacgaggaattcattatgtttcgcgccagcacggggtggcatactttgatttagatgacgtgcgggtgatttcagttaatacgtcagatgttccatatgaattaaataaccgcgggcaaaagcgctatgacaataagattgtattggctgtgcgtgaagatcaaattgaggaaattatcgaaattttggctaattcttccaacaaaaagatcatcttcatgtcccatgccaacccaattaatcgaaaggggtctaatgcacttaagtataatggccgctctttgcatgaactgctagttgcctttaatcaacgtgaaaaaggtcgaatgcacgctagcaatggtgttccaacagaatttcgtttatcaaatgattttgattttaccaatatcaagaatgcgagaattattgcctacttctgcggacatcggcatcgtgaagaccagtatcggatcaacgggattcaatatattttgtttaactgttctgccttgatggggccaaatcattcgctaacaactaaatacaacaaaaacttagaccgaagaattgatcaaaataatgaatttgcgggttatattgtgaacgtcgatttaaaacgacaccgcattcaatcctttggctatggtgcagcttctagacgccgggtgtatttcatttagttaaggaatagtaaaggtatttggctattacaagtgtttagcttataataaaaaggttaaagtaaaaaatagtgaatattatagcaaatattaagatttagagaattgacttaggggaatttaaattatgtgcggaattgtcgcgttttatgatccaaagataaatgaaaagcaggctgtcattggcaaaatgatggccacgattaaacaccgcggacctagttccgacgggtattatactaatgacgaggttgcccttggttttagaagattatcaattattgatcttcgtgggggtagccaacctatttataatgaagataaaactagagcaattatttttaatggtgaaatttataactttaagccattaagagaagaattaattaaagcaggccatgattttactactaaggctgatacagaagtcttacttcatggttatgaagaatggggcatggatggcttgcttaagcgtgtacgtgggatgttcgccttcttaatttgggatgacaacaacaagaccctttatggtgcacgtgacttctttggcattaagccaatgtactacagtaatcaaaatggccatttgttggttggttcagaattaaagagctttttggaatttccaaagttcaagcgggaattaaatgttgaagcagttaagccatacttgatgaatcaatacaatgacctagaagaaaccttctttaagggcgtttaccgcttcccagcgggccattggtttgaatacaaagatggtgaaatgaagacccatcaatattgggatgctgaatataaagaaaatagcctttcctttgaagaaactttgcaaaagatcaacgaagatttgaaagaaacggttgatttgtatagaaacgctgatgttaaggttggtgctttcttatcagaaggaatcgactcttcatacttgactagtttgcttaacccagatgacgttttctcagtaagttttgatgattcaacttatgatgaagcttctaaggctaaggcattagcagatattaatcactggaagttcttcagcgataaggttgatgctgatgaagcaatgcgtgacttcccagaaatgcaataccacatggatgaaccagatgctaatccgtcaatcattccactctggtacttgtgtaaactagctcgtaagcatgttactgttgctctttcaggtgaaggcgctgatgaattgtttgctggttatgtgaactacgggatgcatacgcataacgacattattaaggtctttacttcagaattgaaaaagttgcctgagaagaagcgggttaaattggcacacaagattaagagaatgcctaatttcccaggtaaagttcacatgtacaccaatttagctgaaccgagtgaattttatgtcggtcaatcggttatctatgacatggattacccaactatctttacttctaaagatgctaatagcattttacagccaacgtatcgcaataaattgactgttaacggcatttaccaaaaagactttaagaaagtaaagggagtcgataatgttaagcagatgcaatacattgacttgcaccactttatgcttaacgatattgaacaaaaagctgataagatttcgatggcccattcacttgaagttcgtgttccttacctcgacaagaagattgcggaattggctaactctatcccaaccaagtacttggttaaccgtcatgataccaagtatgctttgcgtaaggcttcagaaaaagttttaccagatgagtgggctaagagacctaagcttggcttcccaactccaattaagcaatggttgaaggaaccacgtttttacaaacaagttcatgctctttttgaagaagaatttgtcaacgatatttttgaccaaaagaagattatcaagttacttgacgacaactatgaaggtgatggctcacatagacgtcaaatctgggctatctataccttccttgtttggtacaagttgttctttgttgattacgaaaacacagttaagaaatatcaacacgtgcaacctgaagttgctaagctaatttcacagggtaaattactataattctagggagattttttgaggatgagtaaaaaatttacgccgatcttactcggtagtgatatcaacgtgtatggtatggcacgttcatttaatgaagcatatggcattaaagtgaaggccttagctgacgttcaacttgctgctactcgttattcaagcattgtggacgttgaattgcatcatggctttagtagcgatcctacttttatggacgtgatgcacaaaaagatggaagaatacaagaatcacgaggagccagttatcttgattgcttgtggtgatggctatgctgagttgctttctaagcaccaagatgaattgaaaaaggtctttatcgttccttacataaaatatgacttacttgaaaaattaatctctaaggaaggcttttatgaaattgcggaagaatatggcttgccttatcctaagactaagatcattacgatggatgactacaagtcaggtaagtacgaggatgtcccatttgatttcccagtggaattaaagccggaagatccagtttcatggttgaagtgtcaatttgaaggtcggaagaagacttttgccattcaagataaggctgaatttaaggatatcgtaactaagatttatactcatggctacaacgctgaccttattttgcaagactttattcctggtgatgattctaacatgcggaccttgaatgcttatgttgataagaaccaccaagtaaaaatgatgtgtttagggcacccattattggaagacccaaccccacaatcaattggtaattacatggcgattttgcctgagtacaatgaaaaattgtacgaagaagtacaacaattccttgaaaagttgaactacactggtatggccaactttgatatcaaatatgatccacgtgatggtgaattcaagttcttcgaaatcaacttacgtcagggacgttctagcttctacgtaactttgaacggttacaacttggctaaatggtacattgatgactatgttgaagatgccttgaaagataaggaaacagtttatggtaataagcttgaatctaaatacaagctttggttaggcgtgcctaagaagatattcaataattatgcttatgacaacgactataagacgactgctgacgaacttattcgtgagggccgctatggtactactgtcttttatgacaaggatagaaacttcaagcgctggttattgatgaagtacatgttccataactacttcaaacgttacaagacttactatgaagttaataagggtaagatctttgacgaagaaaataaaaaattaaacaaatagtttaaattgagaggtaaaaaatgcctctctttttttctaaaaaattttagctgaatcatttcccaatttaatggtcttttggttaatacaagatatattcatctatatttgaacacaatacaagatgttgtgttttatgctatgataaagacacgagatttggagtgattgaaatgctaaaagaagaatttaaccaacaaaatgtaacaaaatttaatacgcctaaaacttttgttaaacgtgatgggtcaaagtatccgttcgcaatttttaaactcaacatggttttgcataacctagatttagataatgtagcacctgctgtaattgaaaaaattgtggctaaactagatgctgctgatgaagtaaatgcacaagatgtagcagttgcttttagagatagcctaaatgagttgggttatttggatgaagctaaagcttatgtgcaataccgcaagcacgatgaagaggaatggattaaacaaaccgatactcgtgcacggttaaagcgaatggttaatggtgacccaacgattgttaacgagaatgccaacaaagatagtgaggtcttcagtactcaacgtgatttaactgccgggaccgttggtaaaacagttggtttgaccatgatgcctgagcacattgctaaagcccacttgcgcggtgatattcactggcatgacttggattacacaccactttcaccaatgactaactgctgtttgattgactttaaggatatgctaactaatggcttcaagattggaaatgcctatatgactagtcctaactcaatcaatgtggctacacatcaagttacgcaaattattactaatgtagcttctagtcaatatggtggctgttcttttgatcgagctgatgaagtgttagctccttttgcagagaaaaactaccaaaagcatttaaaggatgctggcaagttcattgatgatcctgaaaagctggaagaatatgctaagagtcaaactaagaaggacatttacgatgccatgcaaggcttggaatatgagattaataccatgttctctagccaagggcaaacgccatttactactttaggttttggtttaggtacttcttggattgaaaaagaaattcaaaaagatatcttgcgtatcagaattaaaggattgggtagagaacgcagaaccgcaattttccctaaattagttttcaccattaagaagggcttgaacttacatccaggggaccctaactacgatgttaaacaactggctattcaatgttcaactaagcggatgtatccagacgttttaatgtatgatacgatcaagaaaattacaggttctttcaaggttccaatgggctgtcgttcattcttacaaggctggaaggatgaaaatggtaaggaagttaactcgggcagaatgaacttgggtgttgtaactgttaacttgccaagaattgccatggagagtcatggcgataagaagttattctgggaaatcttcgatactagaatgcggacttgccaccaagctttagcctttaagggtagacgtgcaattcaagctaagcccgaaaatgcgccaattatgtatcaatatggcgtctttggtaaacgacttaagccaggtgatgatgttaacgagcttttcaaaaatggtcgagctacgatttcgttaggctacatcggtttgtacgaagtagggacagtcttttatggccctgattgggaacacaatgaagaagcacatgattttacaattgagatcgtgaagaaaatgcatgacttgtgtgctaagtgggaaaaagaggacccatatcattggcattacagtttgtactcaactcctagtgaaagtctaactgatcgcttctgccggctcgatacggcaaagtttggcaaggtgaaggacatcactgataaggaatactacactaattcgttccactatgatgttcgtaagcacccaaccccatttgaaaagttgacttttgaagcaccatatccatattatgctgcaggtggttttatccattattgtgagtaccctaacttgaagcaaaatccagcagcccttgaggcagtttgggattgggcttatgacaaggtaggctatctaggaactaatacgccaattgataaatgttataagtgcggttttgctggtgaattcaagtctactgccaagggttttgaatgtcctaagtgtggtaatcatgatcctgctacttgtgattgtgtcaagcgaacttgtggctacttgggcaacccattgaagcggccaatggttcacggtcgtcatgaagaaatcgtgcaccgggttaagcatatggactttggcatggaagatagtttagctaccgaagaagaagtaaaaaaaggtgagtactaatgcctgaaaaagataaaaacactcaagaaggaccagatatccggagtaatttgatcaaggttaatatgggtggggataccatgtttgtggatcctgaccaatataagccacagttagatcaccaacgtgagttaaaaagaatgcaccgcaagccgaaaaatccaaaaccacaagagtggaagactgaggattattctaaacataaaattgcggattataagccatttaactttgttgatggtgaaggcgttagatgtagtctttatgtttcaggctgtttgttcgattgccctggttgctataatttagcagcccaaaactttaattatggttttccatatacgcaagaattggaagaccgcattattaaagacttgggccagccatacgtgcagggattaaccttactaggcggagagccattcttgaatacttgggtttgtttaagaattattaaccgaattcgaaaagaatttggccacagtaaggacatctggtcctggtctggatatacttgggatgaattgcaaaaagaaacacctgataaaaaggaaatgttgtctaagatagatattctagttgatggccgctttatgaatgatttaaaggatttaaccctgcaattcagaggttctagtaaccaacgaattattgatgtgccaaagtcgatgaaggcaggcaaggttgtcatctgggataaattgcaaaaataagataaactaaagtccggaatgattttctggacttttttgctaggtgaaaaaatggaagaaaaaaatattaaacaagttgatcaaatcatgacggccttgacccaagtgattgatccagaattacaagttgatgtagtaaatcttggtctgatttatggcatcgatatcgaaggagataaggcaaccattaagatgactttaacaattatgggttgccctttatctgattatttggaacaacatattcaaaaagctgttctttcagttgctggaattaagtcttgtgacattaagctggtctggtatcccgtctggacgacagagcgtctttctagtgcagctaaaaagcaattaggtgtaactaaccatgatgatcaaattaagcaggagaaagccaccaaagagaagattatcgacttttcagtaccgatcaagaaaatggcagatgaataccctgactttgttcaaattatgtacgattgtggttttactagaattaaaattcctggattgcttaaaacggtggggcgtgtgatgaccattccattgggagctcaggcaatgaaacttgatttggctaaagtgaaaaaagcatttgaagataaaggatacaaggtaatcaatgactgataaaaaaagacaggacgcaatcctgaaaattttgcattatattcaaaacggcggcgattttgcgaccgcaaagaagatgtttcaagaagaattcgatcaggttgatgtggccgaaattacagcggcagagcgcgaattaatcaagcaggggttaaacccagcagagattcaatacctgtgtaatgtgcatgccgatgtctttaagggtaatatcaaggagaatgcggtaaatcctgattttgctactccggggcacccggtgcatacgattaagctggaaaatatggtactgaaatcattggttaatgacgcactcttgccagatttgaaaaagtatcaagcaggtcaagatacactggataaaatcagaaaagaattgagtgatttggcaacaatcgataagcattaccgacgtaaggagacctcgctttttccattaatgaataaatatggcattacagctccgcccgaagtgatgtggggcgttgatgatgatattcgcgatttaattggggatgcaagcaagattgctggtgaggagcatccagataaagatcagttggctgaggcaattaaaaaggcgagtcatgaagtgcttgagatgatctttaaagaggagagcattatgattccgatgattgacgaggtagctgatcaagatgattggtacaacgttaaacgcgaagagagtcagattggctataccctgattcgcaagccaatgaattggaagccaaaggaagctaaaaaagaagcagggcctatttctgttagcaatctttcatccttcctcattaattttgaagaaggaaggttaaatttagagcagttaaatgcaattttggatatgttgccatttgcattgacctttattgatgaacacgataaggtagcttattttggcggcggtgctgagatttatccgcactcgcgcaatgctattggcaatgacgtattctcgtgtcatactgctaaaagtagaccgttaattaaaaagatttttgcgcaatttcattcaggtgaagttgacaagtatgagtttcactttactccacacaagatgaagcgctgcttatacctacgctattatgcagtacgtgataaaaatggaaagtatctgggttgtcttgaggtagcacaagatgtgacagaaattagaagctggactgaagaaaagaaaaaaatttaacttgttgggctgtgttctagtaagggatgcagctttttcttttgccctcgtgcaaaaaatcacaattcttgctagactagattgagagaatgattaaaaagaagggaagagagaaaatgcgcacagcacatggaaaacaaccagctgatgaaatcaaattgcattggcttcttctaggccaattactaacgtggttgggttccagctttatttggccatttacttcagtttacctgcacgaccatcttggcgtttcactagctttagtgggtgtcgttttgctgttcaactgtgttgcaaatatgattgggtcatttatttcaggctggtgctatgaccatatggatccatatgtcttgctgattgtgggggctgctttagatgcggctgtcttgtttggcatggctttgaatcatagttggccgttatattggctctggatgactttaactggctttttgggtggctggaatggagcattgattaactcgattgctactagtattaaatctaagccaggtcgttatgtcttcaatatgatctactttgctcaaaatgttggggtcgtttgtgggacattagcagtaggttatctttatgattattcagtgactttattatttgtcattgctggtcttttattcgttggcgtttgcgttaacgcaattattaattatcggccaatgattcagttccacaaggagcgtttggctaacaaaggcgaatcaaagaagaagtcctttgagccgatgccaaaatacaatctgattatgtcaattggcttttttgttacgatcgctgtaatttggttgatgtacatgaactgggaatcaaacttgtctgtctacatggtttctttgggcattccttttcatctgtatagtttgttatggaccatcaatgccggaattattgtcatcgtgcaagctatcttaagtcgttttactatctttaagagcttatttagacaaattttatttggcactttgatgtttgcaatttcttttgttactttgatttttgccaaagattttgcacatttcgccttatccatggttatcttaactttaggtgaagcaaccgcaatgccgtcgattccaacttatgtcaatgatctgtcgcccgattctagtaagggcaagtatcaaggcttaaccttgtctgcatcgtcaattggtcgagctctaggtccattatttggtgggttaatcattgaagatttcggctatattcaattctttgctgttgctgcaattggtatctttttgcttttagtcatgcttattccaatgcatgcaaaactacagaaaaaactaaaattatttgtaaaataaaaacaacatgatagcgttaatttttttataatgctatcatgtctttatatgaaaaatttttccactagggaggtaatttaatgtattttaacgtacgcggcggtgctggtgacattactaaggctaatacttcagcgcgtctacaagataatttatatttggccgttaactcagaatggttggaaaaggctaaaataccatctgatcgttcaagaaccagttcatttgatgggatcgatcttaatattgaaaagaacttgatgcaagactttgcagattttgctgctggtaagaaggaactgcctactgtgcctaacttcaagaaggcagttgagctttacaaggttgctaaaaactttgacaagcgaaatgcggatggtgccgcacctattcaggcagatttgcacgaaattttagacttgcgcaacttcgctgactttaacttgaaggcagcagatttttacaagaatggttttgccgttccatttgctttcagtgttgaagcagatatgaagaatactaagattcattcattgaattttggtggtccaagtactttcttgccagatacgactacttacaagactccagctgctgagaagttattggatgttttgaaaaagcaatctattaagttgttaacaatggccggacttgatgaaaaggacgcagaagattacgctgacttggcaattaagtatgacgctaagattgctaaggttgttaagtcaactgaagaatgggcagattacccagcaacttataatccaatttcattggccgactttgaagcaaaattcgattccttcaagatggattacttcttgggcggattatttaccaagaagccagaacggataatttcaactgaaccacgttacttagatcacgcggaagaattgttgaatgaagaaaactttgacgaaattaaggcttggatgttggttaagttcgttaacggcgtagcctcaagcttgtcacaagaattccgtgaagctgcctttccattcagtcaagctttatcgggtcagccagaactttcaactggtgttaagcaagcatatcacatcgctaacgctgactttagtgaagttgtgggtgtctactatggtcaaacttacttcggcgcagaagccaaggcagacgttactgatatgattcacaagatgctggatgtttatgaaaagagaatccgtgaaaactcatggctttctcaagcaactaaggataaggcaatcgttaagttgcgcgctttgatcttgaagatcggttatccagacaagattgaagaaatctatgaccgtttacaagttgatccaactgctagcctttatgaaaatgaagtgcaatttggtcgggaacaaattaagtacaatcttgagaaattgtaccaagatgttgaccgtacggtatggttgatgccaggtgatatggttaatgcatgttacgacccacaaagaaatgatttaactttcccagctgcaattttgcaaaaaccattctatgacttgaaacaaagtcgtgctactaattatggtggaatcggcgttgttattgcacacgaagtatcacatgcctttgacaataacggtgctcaattcgatgagtttggtaacatgaagaattggtggactgatgaagattttgctgaattcaagaagagaacgcaagctgaaatcgacttgtttgatggtattgaatatggccctgtaaccttgaacggtaagcaaatcgtatcagaaaacattgccgatcaaggtggtttgactgctgctgttgaagctaacaagggtgaaggtggcgacaagaaggcaatgcaagaattgtttgaaaactttgctcgtgtttggacaactaagcaattgccagaatcaattaagacgcaagtatctatcgacgttcacgcaccaggtccagaacgtgctaacgtgcaatcacaatgccaagaagaattctataaggcatttgatgtgaccgaaaacgatggcatgtggcttgctcctgaaaagagagtagtaatttggtaagtaacttttcttaatatcgagtatgaaaaattagctaaattacatataagctcctataacaagaatgactacagtgctgctactacactgcagccctttataacttattacccattaataaattttttgcactaaaaaaggctccctgttgggagtcttttttagtttagtaattatttagttttagctgtcgagtaatcctttggcttaatccgcttaatgtaagatggatttggtcgacccaggattaatggtacacgctcgattacggtatcggcgtattctaagccgaaccaggaagctgggttagaagacaagttttgcaagcgaacccgcgcttccacaagccatttttcatagccaaccaattgtgtttgtggactgatgacgtcgttaacaataacgaatgagaagtcacctacgtcacgacctgggctggtggtgtattcctgtggttgtggctcaatcgtaccgtcggcgatcaagtcatgaacgatctgacgaatgtagacattcacactagtttgcttcttaaagccgaggtagagctgaatgttaattacgttcttcgtaccgtaagtgttaacagcatattcagcggtaaatggctcgttagtaacattgacagtgacaaaccagtaagcctttgctcgtttaggtcttttatccaaaattgagtacaggatttcacgtttgatgaacttattgtacttaacgttggccatgtaaaccaagttggtagcataagttgggtaattttcatcgtgacttaagttcgttaacatgtcggtatattcatctaagcgaacgtaagcattgcgagcttcacgcttgtcacgaaccttgttgccgtaataccaaacatacattatgaagccgatagcaccagcgatgaagagtgaaacgtaaccaccatgagtaaatttagtcaaacttgaaatcataaacatgatgtcaaggacaccgaagaagatcaagaagatccagttccaaacagtgttgactttcttcattactaaccattcataaagcaggatggtagtcattaacattgaaattgtaatggacagaccataagctgcttccatgtgagctgaagtttggaaatataagacgattgcgatagtagcaacacagatacccttgttaatggaaggaatataaatttgtcctttttcgttagatgggtagttgatgttcattcttggcaagaacttcaagcctgaagcttctgcaactaaagtgaatgaaccggtaattagggcctgagaagcaataacagcagcaatagtagccaaaatgatggcaaacaatctgatgttagctgggatcatttcaaagaatggattgagcacaccgccgtctgcaggacggtaagttgggttgttcaaaatccaaacgccttgaccaaagtagttgagtgacaagcaaacaaaaacaaatggccaagaaccaataatattgcttttaccaacgtgaccaacgtctgaatataaggcttcggcaccagtcgtagctaggaaaattgaccctaaaataaaaattccagccttattatatggactgactaataatctaatagcgtaaattggattgattgcttgcaagattgaccagtcaccgaccatgttcattacgcccattacacccaaaaaagtgaaccaaaggaacatgattgggccgaaggctttaccaatgatactagttcccattttttggatagaaaacagaactagcagaatgactacagtgatggcaataaccatgttttgagtagaaacgggtacattgccgccaaagttcagtcctttcagtccttcaatcgcagttgtaactgtaactgctggagttaaagtaccatcggccaaaatagcggctccaccaattagcgctggtagaactaaccatttagctcgttttctaaccaatgtgtataaggcaaaaatcccaccttctccgtggttagttgccttgagggcaataattacggtttgtaaggtagttagtagcgttacagtccaaagaaccaatgaaattgatccaatgataaagtcacgatttacattaccaatgccgccgttgccttcgacaattgatttcataacataaagcggactagtaccgatatcgccgtaaacaataccgatggcgattagtaagccggccgcgctcatgcgtttagctttattattcattatctcgttatctcccacaacaaaattgtagttttaataaaaaaagaaaatgccacgatgacattttcccttattgtacctattttcgtctatttcgctggacaatgcaagtgagatttgtcagaaattgaatctagaatttggtgatgataaagttaatgcattataataaaaaatatgcagtaaaaaagctcccatacagggagcctttttgatataaattatgaaagtgatgaaggaatcttagtacgttggtcttcgtcccatttttcccatgcttcataagtaagcatttcttctggcttaacaccagtcttttcttccatggccttaagcaagtccttaaagttgtagtcgtggtattgtaacacatgatcaaccaacttcttgcgtgggaagtggatgttgtttaaaacatagcgattgatatcaaccatgttatgattttcatcgtaaaggttgataacttcaagatcgtcttcatcgaattcagcgatgtagaagttagcgaagacctttaagtaatcaggttgttctttgaattcttcctgtggcatagtagtcttgttagcttctggcattacgactttaaagtcgtcgttttcttcattttctttatcagcttgagcttgagcgttcttttcttcttcagtcaaagttgttacccctttatttataaataaatagatacaaagtcaataataattttacagacttctacaaataaaagcaaatagaagtggttgagagatgcaaaagtatagaagtcagttttgattagtaaaatggagtaaaatgaagtaaaatataaatgtaaaaagtaaaatgaagtaaaatgaggaaaaatatgtataatgaaaatccttttgatgctgaatttggcgggatcccagagctatatcttgattttaatgatgatgcagttaaatttgctcaaagagcccatcgtctcaagaaacatccaacttattctctctttattacaggggtacgaggttcaggaaaaacagtttttatgaacaaagtgggtaaagaactaaaaaaatataaagatactatggtagtcactttgcacaattctgatgatctttttcgaatgatgtatatcaagctagtgcctatgctagataaaatcaaaaaatggacgccatcaatttctattaaagttccttttgtatcagtagatttcactgaagcaaatgaaaagcatgatgaaatatattataaagtagaaattaacaagattcttaaagctttgaacaaagtggggattcgtgttgcattttgtattgatgaagtgtcaaatacacccacaattcaaaaattggctgaggaattcaacgactggagcctaaataactatcaagtttcagtgattatgaccggactattaagtgaagtggcggaactatcaggcacacataatttaaccttcttggttcgggcggatagatttcacgtctctaaactatttgcgtcgtcaattgccagaacttacatggatgtattagacataacagctaagcaagcagaaattttggcagatatgtcaaaaggctatgcttatgcatttcaattgatcggagatttgatgtatgaaaatttaagtcaaaagatgacgtttgaaaaagctttggaatatactaaacttagattccgtgatgtacttttcaaccaagcgtatgatgtaattgctcatgaattaacggatgtggattttcaatttttgtacgctatggcgcaagataatagtattagttcaattattaggactatgcaaaaaagtaagcagtatgttaatagctatcgtgcaaaattaattaaatatgatctaattaagccaataattaggggaaaggtcggctttaccttacctttgtttagagatttcattcaagcaaagtatgatgagcttaactggggctagaatttattgaaaaaattcggcagaaaatcacagaaatgaacgcagatccagtttggagggatactattatggactatgagactaagctagctgaagagcgtgaatacggtgaagaaaaaggaattttaagtgcaattaagaaaattatttatcgtaaccggagctatggtgtatcagattccaaaactttggaggatctgacagaagactaccatgattctgtttcccgggatcaaattgaacaaatgatgaaagaagcctaggtctaatgaaaatagccgctgctcaatgtgagtaacggctatttttttacttgttatcatcagcagcagagctggaacttacggcagatgattgatcgttgcttgaggaagccgcgctggattggttgatggatgataatttaagtaattattcttttgaaaaaatatttcttacttgttggagtaaattatcgaattctgttgattcttttatgtggccgattatttttccatgacgggcaatgaaatcatacgatagcatttgaaataataatgcatctccatttgtgtgactagcataatctagcacatagaatctaaatggatcatctgtaatatggttatgagtaattgctagtcctattactaatccagactttttagtgtaagcatgtctgctcactactaaatagcgtctacgaatatttcctttttcagaatcatgtccacccatttcgtgaccagcatgtggttcagcatcgatcattattatgtcaccttgatggacatcaatccttctcatttgctagttcctttccgacaggtttgacttctctaggattgtatcctaattcttggtattctcgctttatttcagtatcataatcataatcgtcataagcggggtctgaccataaatcataattgtttttagcaattcttttgtatacaatatcaccgtttttatttacatcaacagagaattctgtattaagtggaactttgatagtacttggaatggtaagcactattgaatttccttgttttctagccttgactaccataataagccctcctcgtattatataaattgtaattagtcatattgtgataattaatcaaattagtatttgctttttgatcttcacatgttagcctctaattgtcattggctttggtcaactggtctaggttatcacctcctgcagttttgtctgctttataagtctgccacccagacagttcctttatgctctaactcacatgctgtattgattgcttctttttgctagtccttgagcaattgggattaggtgcagctttcaaagaagcaaccagtgaatacttatactggcgagattgaacttaagaactgtaattaggggttaacatgtgaagatcaaaatctatgatcagaaatttgaaagaaaggaggccatttccaatgaaattatttgtcggtattgatgttagttctaaagatttacaggtcgttgcacttgattcagaagatcaaaacaaacgcttaattaacgatagctttgtcaatgatctttatggtgctagtgaactgaaaaaacaaattttagatctagctcaaaataaacactatgatcaaatcattattggcatggaagctacatctatttacagttttcatcctgcttactttttccaaaatgacgaagatttacaaaagctcaatgtagagactgatgtaattaaccccaaagaaaccagcaggtttcataaagtctttgaagaaagtaaaactgatcctctcgatgcttattacattgctttgtatctaagctttggacattatcgagtaagcattgccagacaagacaactatcttgctttagagcgtttaacgcgtaccagatatgaattagttcaagaactgactcgtaccaaacagcacttcattgaagctttatattatcgggttaataaactaatcactgtcgataaagataagattaatactcctcttttcggtgctacaatgatgtctattgtaaccgatagtaaaactctggatgagatcgcggatatgcctaccgaagacttaatttcttacttacaggttaaaggcagaggacgcttttccgatccagataccttggctaaagcaattaagaaagctgttagaggttcatatcgcttaggcaaagtaatgactgattcaattgatgcagtgctttctgttcattacaacatgatccaaagctttaatgaatctattaaagatctagaaaaagcaattgatcgtatcgttgatgcattaccagaaagcaaaattctggaatcaattcccggtattggcaaaacctatacagctggtattatcgctgagatcggaagtatcgatcgctttgataaagaagaacagctggctaagtatgccggcctaacctggaatcaatatcaatcgggagatcacagcaacgaacatactccaatggccaggactggaaacagatatctaagatattacttgattgaagctgccaatctagcaagattacatgatcctgttttcaaaaaatattaccaaaagaagtatgatgaagctgtctactcgccgcataaacgtgcttgcacattaactgcaagaaaattagtacgagttatctttaaattgctcaaagatgacaaactgtacaggacaccgaggtcttaatttcaaaaattggtctaaatttaaaagtaaacaaaagtttaacattaaaaaaatcaacctttaccaaggcttagtttcatatactcaaatttatgatcaaaaagaacaaatatcatcgcctttcatttgacttattaccacatgacttatgctaaaaatattttattatttaagtatatactgtgaatacagtgagcacaaacaaaaggagccacaaattggctcctttttcgtttgcttacttgttatcatcagcagcagagctggaacttacggcagatgattgatcgttgcttgaggaagccgcgctggattggctgctggatgattgttcctgctggtgatcgcttgaagaagatgaagaacttgattgatcatctgacttcttgtttgatgagctggacttcttggactgctctttatccttatcagatgaggattttgcagaatcatcctgactagaattatctttgttagaatctgcatcagaattattagatttttgctggtcaggatcagcgttctttttattggaattattataggaagtattattgtgcgtttgagtgttggcatggctaatgtaagcaccggcgccacctccacctaagatgaacatcgcagcaataacaccccaaaagactaatttcttcatattaagacaactctcccttatcttagaaaaaatattaacgaatttgagccaattggtgactttgaatcgttagttatagtgtaagacatctggccggcaggttgattacaaaatactcaattttaactaattattaagaggtagaagaaaaatatgaattacgaattaactgaacaatcaatccaatatgtatttggcaacaagaagtataagaatgggcaaaagacccgtaacttgaagaacgtaaagactggcgctaaggcagatgagttgcaaaaggtgggtcaagcaattgctagtttgcaagaagactcacttgatgaagcatacttagtgcagaagtcacgtcttgtaccagcagctgaataaattaacgaacatatttaggaaataaggagaaaaaatgatggctaaaactactaagactatgaagttaactttcttgaacggagaaaagaagaaaattagtattacgttgggggatgcagtcgataatctaactgcggatcaagtacgcggtgcgatgaatacgattgcggaagccaatgcattcgagaaagacggtgttgcatattatcacactcctcaatcagctgcatacattgaacgcactgttactgatatctttaatgattcagcagaatctgcagttgagcctgcagctaagcaagactaatctggacttgcttgaccaactaattagcttggtcaaaaggctcaggagaaaatatcgcaagatgtagagttcacacttagacctttaacagaaatcgtatagtaatattactttttcaattgattttgttacatcgttgtaaaatttaagaaaaagtaaagaaacagtaaagcgggcgtatgctcgctttttcttgttgtgtctaggattacggcattttgttattttagatttgtgtgaatggtattgggatagggaataggtgaattattacaaaagcaagattgtagtcaatttaacttgctattttttcaagaggttagtacaatatgaatcgtggtaagtaataggacgtgcttcaggcgtgtcgcctgtacgcatgctgatccttcagcaatgactactacctcatgagagttataaactcatggatcttgctttgaagaattttgtacattataggctccctacatgctgaacctatggcctattacattttttatatttcaaggaggaaaagaccacatgaagaaaaatttaagaattgttagcgctgctgctgctttattagctgttgctccagttgctgcttcagctgtttctgttaacgctgctgcaaccactaccaacacagtatacactgtaattaatgctgatggtaccgcaatcaacactccagctgatgcaaaatacgatgttgatgtaacacctaaccttactgctattgcagcttctactgtaaatggacaaactattaacggtagcattactggtaacattactgctagttacaatggccaatcatacactggtactttagcttctaagaatgataacgctgctgctactgattcaaagggtaggacagttactcattttgcaaagcttgctaatggtttatatactgttactgtaaagggtgtatcattcaactttggtattgctaacgcaaacaagactatcactcttggctccaagaacagcaatgttaagttctcaactgatgagggtaagagctttgctaacactaaagaagttgaacttaaccaagatggtactttaaagaaacctatttcaattcaagtttcaaacgttaatgcacttgacctttcaaatgctagcggtattaacttctacaacgcttcaaacggttcacaagtaactaagggttcagttaatgtaactgctggtgttaacggtcgtttgaacgtttcaactgttgctagtgaaatcttaaagaactttgctgcttaccaagtttcaaatggtaaggctgtatcacaaatgccagaccaaaaggctgtagttgctgatgttaatgctgctttaaaggctgctaatattccagttgacaatgctggttggtttgctgctccaacttcattctcagttaatgtaaaggtaacttcatcaattaatggtgttgacgctactttacctgtaaccgttaatgttgctaacggcaaggacactactgtaccaagccaaagcaagactattatgcacaacgcttacttctacgacaagaacgctaagcgtgttggtactgacaagcttacccgttacaagtcagtaactgttgctatgaacactactactatcaacggtaaggcttactacgaagtaatcgaaaacggtaaggctactggcaagttcatcaacgcagacaacattactggtactaagcgtactttgaagcacaacgcatacgtttacaagacttcaaagaagcgtgctaacaaggttaccttgaagaagggtactgaagtaattacttacggtggtacttacacattcaagaacggcaagcaatactacaagatcggtgacaacactgaaaagacttacgtaaaggcttcaaacttttaattaagtctatgtagtagataagataaaacgaggcaatttgcctcgtttttctttttgctctagaaaaaggtaccgcttgttgcgacaccctcggaaaatattattgttataacctagctctgcttcagaaattcttctaactgtttatcagagaacacattgccatacttttgctttaattgttgcaggatttgttggctagtgcagccaacatctttcaaagaagcgactaatgtaagtgcacctgttttaaggcctttcttttcaccaacttgctcgcgttcaagcattctagtttccaagtccataatagtatccctccattctggatcggcattcattgattcaatacgtttttgtgccttatcaaaaagcttgtcaccatgtactggctaattttaaatccaactctataaaccatttgttataataaacgttgacgtttatgccttccaatatcagatctcgcattgggaggtgaacacatgctagatttgtttcactttttattaggctctatcttagcgccacttttagtgaacgtagtttcttatgtcttagagagactatttgacaagcggctaggcaatggtcatagcaaaaggcgtaaaaattatagattgggctctaaaagacatcacaagcgtcactagcctcagccaatacatttagttttaatgctataaaatttggtgaaacaaaaaatcgttactcatttgtccgattagagtagcgatttttttgtgtcttaactctcgcacatgcaagtcgtttcacttttatatatacatgttagcatatttttctatatttttctatattcagggtttgtttgcagtatttacgtttaaattaatgttttggctctaaaaaagatgccgcttatgcgacatcttggaaaatattgttgttacaacttagctctgtttcagaaattcttctaactgtttatcagagaacacattgccatatttttgctttaattgttgcagaatttgttggctagtgcagcctacatctttcaaagaagcgactaatgtaagtgcacctgttttaaggccttgctgtaggcctttcttttcgccttcttttctgcctttcttctcgccttccatacgacctttcttttcaccaacttgctcgcgttcaagcattctagtttcaaaatccataatagtgtccctccattctggatcggcattcattgattcgatgcgtttttgtgccttatcaaagagtttatcgccatgtaccggtaaatctttcatgagtttgactaaattaagtaatgtttcagtctcggttccatcaggaactccgtttgaattaattataattttagtcaagccatcctgcaatatatctgcatgattgtctacattaatagtttggtatgtagacttgattgcaactttttgcttagttttgaacgtgcaaagaaaaataatgaagacatttttcaaattattgtaagtatagccctggtggagagtatacctttgatcgtttttcgaagcataatagcgcatgcgacgggcaatatcgtcatcgtctgaccgctgcatctcaatattgtaaaggttgccgttaatatcctcaaccaaaatatcgagtcggacatctttttgatcccgatgctcaggatcgatgattacttcttgcttcttaggcggaaagatcttcttaattaggatctccggcagaattccttgcaaaacatgcttgcagaaagctggattggacatgatttcgccaaaaaccttatcttctgaaaaaccaaaccataattctttttgtttgtgcgtatttttcattgcgcacctctttctaaaaaatagtaggataaaatgtaccctctattatttattacgcaaaaaatcggcaaaattttttataaaattgtttttttcagcataataatttctagctatacaatcaatgcttcatactgtataatactattcaatatttgaaacaatatagatatattcaaacatagggagtgtgatggatgtgtcagcctacaagcaacgtaacttggggattattagcttgcccactgacataaaatatcgtaattggtccaaggaccttaccaagcggagaattgagaatgactcgcaattagagcaatacatcaagtatgacaataaatatcgactcaataagaacacattggcagtctatgagttcaagcaaaatcctatcttaggcaaatataaggcagtagccttcgacctgaatcgtggaattgtgcttagtcagaagtcaacacatgccatgatgcaaggattgatgcggcatgccgtacattgcgatatgatttggcagagaatgctagctcgcgaggctggagttgatatctatcaagggattgtcatgtacaatgtgctttatttttcaatgcatgcatttagtggaaacttcttcacggactggatttgcttgcactggattaaagacttccacgtcaaacgccatgatcaagctattttcaacagtattgcacttgatgaaaacggcttggtttataattttgcttttgattctcctaagcccaatcttacgaagataattggtcagtatctgtttcataatcattattattctgacttatattatcagcatatgttgcaagaaaataatcttcgcgtaacagccattaattctgattcaatcctgcataattctaactattatgtgcaactggacttgtacgctattgatagttttaaaaagctggcagacaaattctacaatcatgttttgaacttacacctacttacgattgtgaaagaatttaagccattagattatttgcaccgtgaacaccgcttttttactaaacagattattaagatcagatataatagttaacagctctcatgagctgtatttttttgcacttttttgactatcatctgttcttcgtcaggtactatctgacttgactttgcttatcgtagaaattaacaaacacatgcgacacttgggattagagcatctcaccactaagtttttttgcagatccaatcttgctaatctaatagtgcacaagcgcttgtgacatcatttaggagagtgtcacaatgacaagtcaaaaatatttcgaagaagcatggaaaaatcgtaagttagttggtggtgccttaaaggcggcacatgttcgaccggactatcatctctatgaagatctgttgcaagaaggtgtaattttgtatgccgagatgttgcgcaaattagatgggcaaaaggttcgcagtgagattgataagcttagcttcaaaaaggttctttggcaaacaatcgatgctctgcgccgagagcaacgcgtatgtgaacgcaatactgcaattgacgaggcttatgacttaggtaaaacagaggcatgggataatcttgtagctttaaagaatgagattaagaaactaagtcaacttgagcaagtaattctttttgagcatttgcttgagaaaaagacaattacgcagctagttaaagaatgcggtataccgcgtattacgttgaaacgattgaaaaagcagcttttaggtaaattacgtaatgtgatggaacaataagttcattttgtaacaaaatttaatttcataaaaaattttacctactttttgcgtaataagtagtagagggtaattttgctgaagcaataattgaaatgaggtaaaatatgattaaaataaaaagtcgatatccgagaagcactgacgatttggtctttggtcacgtcatgagcaataagaagaattgaatttcagactggtacgcacgttaaagttttcaattctaagggcaataatcatgacctgaaccaaaagataattgacttcttggattacatgaatggaatcatcaatcaccctgaaggttacatcgccagcttgcaaaaggatgtcgaccattacgtgaatagcggaaagtgggtcgaagatatggacaagttggaatatgaaatgaatgaagtcgctaggaaagtaaaaatagaagatgctaagaagctagtcctagtcattaaacgaatgggtggtactaaagacactgccttacaagaactcacaaacaattacggcgatatgcttagccatgatgaaattatcaaactagtacatgaagtttatcagtaaacagtaatcaataatctacagtaaaattatctttcaaaggtgtcgcaacagcgatgcctttttagagcaaaagaaaaagttcccccaattttatgttttataaaaaaaacagtatctatgctaattatggttctcaaattgaaaaatggataatttgatgttggaacaattgatggtattcaagttaaatactgcttgattggttgttagaagagtaaaaaagccatttcagtcacatttttgctgaaatggctttttctattttccatcttttaattatattatcttgaaatgacctcttcttatcctgaagtgtagtctaccaaaaatgtcagagattatttcgttccttctcgtagagtaaattattatcctaaattctattctcgttaatcatgctatcaggcaatataattttcattcgatcatcgaacatattgaagtttacctcagagccttgaatctgataatcataatgaatcaatgcattaactaaaacctctcgaataaccttaaatggtttaaatatttttatattgcacctgtatcataatgataaaaaagttaacgaatgcaactcgttagctctagtcgtagtctaagataactattagcttaatttttaagagcaaaagaaaaacgaggcaattgcctcgttttaaattattttctctttttagtatgtttgacagttttcttatgtgcctttttgtgattcttcttatgagctactttattatgtttcttcttggtaactttcttcttgcttactttaatagtatttccagtaatattacccaaactagtatgacttaatcgaccattcttgaccgcaaaatcaaattcaagattaccttgtgcaagagtactgtgtgcattaacactagcagaaccaataatttcaccattgttattaacaatagtaactgaacgatcagttgaagttggcgtcaaacccattattgttacttgtgcatttaaagtatatttaccattgtttaaaactgcatcgtttgtttcaatttcagtaccagtattattagtcaaatggatgttattaattgaggtagaagcactaattctagtgctgtttgtgtatacacttctatcacgaagatagtgagtgacaacactacttttagttacaactgcagctgcttgaatagtatttggggcagctaccaatgaaactacaggcgatgcagcgaacaaagccgccgctacaatactagtaaatttaaaattctttttcattattatttcctccaaaaaaagacagagctttcgctctgcctttcttatttgtcagcgtataccacagacttaattaaaagtttgaagcctttacgtaagtcttttcagtgttgttaccgatcttgtagtatcgcttaccgttcttgaacttgtaagagccaccgtaggtaacaaccttgtcacccttcttaagaacaaccttattagcacgcttctttgaagtcttgtaaacgtatgcgttgtgcttcaaagtacgttcagtaccatcaatgttgtctgcgttgatgaacttgcctgaaagcttgccgttttcaactacttcgtagtaagccttgccgttgatggtagtggtcttaggtgaaacagttactgagttgtaacgagtcaacttcttgtcagtatcaacatgcttgccgtccttgttgtagtagaaggcgttgtgcataatagtcttgctttggctagcaacagtagtatctggcttagtagcagttaagtctgaactcttaacgaattcgtttgagccttccttgttgatacgagtgtattcaacaccgttaacagttaccttaccgaatgtgtaaacagctgcgccctttgcaagagctggaatattagcagcttctgaaacaacattaccgttaatgttgtaaactttagtattatcagcctttacgtattcttgtggtgccttttcagtaggacccattacaattgcgtaaacagtaagctttgaagtaaagccagctggattagtagcagtaatagttactgggtacaaacctgcaacacttgggttaaccttgcttgagtcaatcttaatattgcttgagttgatcaattgttggtgagcagctaattctgctggagtcttgtcgaagccagtaccataggcactttgtacgtaagctttaacagcaccagttacagcatcgttgttaaatttaccatttacaataactttggtcttgtcagtgtccttaagtactaagttacctgaagttttaccatttgacataacgttgtcattgtagtaaacgttgccgtcaaatacaaatgcaggtgcattgtagtttactgatgcattaattcttacagtaattgtagttgaattaccattttctgacttagcagtcaacttaaggttgaaaccgtttgctggataatcaaagttaccgtttgaagcacgcttcaagccttgagctactaattgactttctacatctgaagcggtagtagtcatattaatagtgtcatttgattgatcactggtcttccaagcatagtgcttttgaatagcattcaaaagatctgatgaactaaagccgttagcaatttcgtttaatgaaacagtgctaccatcgtttacaacagtgttagtatccttgttgtagaagtaaggagtaccttgttggctagcgaacttagcatttaaagtaacttggtaagctttgtcattaacagtgaatgtaacaacttgttggaattcaccatttgagtttgaagcagatgctgacttaacagtaatattcttcatatcttctggcttagcatcctttaatgcatcgccacctaattgtaagatagcatccttttgagcatcgctcaatttgatactgaattgagtatttgaagcacggtcaagaacaatggtgcctcttaatgtaccaaggtcagtaacttcttgagaagaagcaggtgcaacagtgttggtagtggttgcagcagcgttaacagaaacagctgaagcagcaactggagcaacagctaataaagcagcagcagcagcgctaacaattcttaaatttttcttcatgtggtcttttcctccttgaaatataaaaaatgtaataggccataggttcagcatgtagggagcctataatgtacaaaattcttcaaagcaagatccatgagtttataactctcatgaggtagtagtcattgctgaaggatcagcatgcgtacaggcgacacgcctgaagcacgtatattgtgtactcgatttttttcaagcaatgaaagggtggtttctgtcctcttatttgcttggggtcggttgggtgggttttgtccgctgcgcagatacttttatgaaaaaagagtacgatgcgatttgatgatttagagtgtcatttttggttttgttaagggatgcttgtaaaataataaggtaaagaaaatctaaagaagtaattttgtgaaaaagaaatcgacattttttgcgtacttatatattgtcaaaattaagatatgtaggtgataattatgttaaataaaaaggataaaactaaaattcaagaattaactgataaaacagtggacttgatcgtagaaaatatggggaaatcgcgtaaagaagcggaacaagattttcaaaagtcagatacatatgcgttcttatggctagcgaagcgtaatattgaaaatgagcaccctattattttgtacagaatgtttaattctgagttaaaagctaaaccaatagatgaagaacaacaaagttttattgactttatgactgataacacaatcgagttaattacacagaatactaattggggaagataaaaggcaactaaagttttcaaatctacaaaggtatattggatactagttcactcaggacataatttagatgaatcttctcccgaagagctgttttatatgtttagaaataaacttagtataggtaatccactaccttcatctacgctgaagttaacttattaaaaaatttatataagttaaataatattattacaaatgttacttttttacaataaatctgttgaaacgcttgtctagacctaatttgctagatacaatggaggtgttatattaaggaggataattttttatgaagaagagacttttgaccagttttgctgctgccgcaatgcttactcctgtagctgtgccagcagtaaatactacgatgatgaatcaagcctcaagccaacgagtttctgccgctaccgctgatcaaactgcatttttgaataaagctgctaagcaagctgtgaaagcagctaaaaaatatggaactttgccatcagtgatgattgcccaggcaataactgagtcaggctggggaaagtcaggattagctgtgaatgctaataacctttttgggatgaaggctgatgattcttggacaggtgagacttatactgccaagactagagaagaagataaaaacggtaagagctactatattactgctaagtttagaaaatacccatcttttgaacaatcatttgaagataatggtagtaaattaagaaatggtgtttcttgggatccgttgcgttataagggcacttggattgaaaatgcatcaacttatgcagctgcaaccaaggctttgaccggtacgtatgctacagactctaagtatgataaggcattaaatagtcatattactagttctaatttgactaagtatgatccagtaaccgttaatactactagaacttatactgctggcaaggatagttcaacttataattggccaactgctccatctgttgccagtgctattggctctgttaaagctggtgaaaaagtagtagttaccaagactattactttccatgatggttcaagcagaatgtatattgatggtcgcggttgggttaatggctcagttttggacaagagcagttctgcaactaaggaaccagtaactcaggcacctaagaatgtgccagctgtttctaagaacttgatgcataatgcctatgtttatgaccaaaatggtaagaagctaaagggcaagatgtacaagaccagtgatgaaaacggtggtaagtggatcaatacttatggtaccaagaccatcaagggtaagacctactaccgtgtcggtgaaaatgaatacattgcagctggtaatattgatggtagcctcagattcttgaagaagaatgcttatgtttacaatcaatatggcaatcgcgataacaatttgaagcacaagaagaatagccaaattgctacttacggcagtgctataactatcaatggtaagaaatactataaggtaggtattcgtcaatacgttaagaaatcgaacttcatgtaattaaggaaagggctttgttgtgaagatacgcaaatttttaattgccttaattgcgcttttggggttagtcggcgtatcatcggtcagtaaccaggtcaaagccgcttcgattaatactttagcgaagaaatatcaatatagtggtgtcacctatttatacaagatgctcaaactagaggggattaagtacaataaattccctggtgttgagtatcaaaatggcaagccagaaggaattgtcgttcatgagactgacgatcccggagctactgctcacgatgaagcaatctactttaaccgcgagtggaaaaatatcaacgcttacgtcaatgcttttgtagatagtaagcaagtcatccaaatgtattcacctaataatggtacttggggcgcaggaccgaatgccaacaatcgctttattcaaattgagctttgtgaagaagatagtcgtgatgcctttgctaagtcagttaataatgatgcaatttatattgccaagttgcttcatcgttacaatttaaagccagacaatgcttgcgatgatggtgaaggcacaatttggtcacacaaggcggttagcaccttcttaggtggaacagaccacgttgaccctgatagttattttgccaagtgggattacgacatggatcagttttattctttgatcgagtattactatgacttgcaaaagaagaatgaaaatactgatactaaggatccaaataagattaaggacgaagtaccagcagaagttcaaggtgcggtaactttaggtcacgatgcttatgtttatgacaagaacggcaagaagaccaagatcttgaagttagctggtagtccggtaaccgttttaggctacaagataatcagtaataagaagtactatcaaattggcaagaacgaatacgtagtagctactaatattgatgctactgctagaactgttaagaagaatacatatttgcggactcgttcaggtcgaattgaaaaaggtaatttggtcaagaagggtagtcgggtcatgacatatggcagcaagattacaattaaaggtcaaaagtattatgctttaaatgctacacaatatgttttagctagcgatattaattagaaaaatacgtcttaaaccataaataatgggaattaagacgtattttttgtataattcttgtgttgaatgtgaaaaggggagaatttaatggcgcaattatcattatttttggtcgtcttattagcgctcgtaattccaatatttatggcgcgtttcaaaataagcactgtaccaacggcgattgctgaaattatcgtcggaattattgtaggttcgagcggatttaatatcgtggtttcgatacatgatttaacatttttatcgaacctcggcgtaattttgctgatgtttttatcaggaatggaaattaattttgacctgctacagcgcaagaataatcctaaggctaaatcacaggcgggaaaaactgtcgatccgttgccaacagctttaacagctttcgctggaattgtggtaatggcctttgttttggcatatgttttaaagctgatagggctatttagcaatgttatcttggcagcgattatttttatgaccattgcattgggtgtagttattgctaccttgaaggaaaaggatattcttggccgaccgattggtcagacaattttgttaactgcggttttgggcgaagtaataccgttgctcttattaacgatttatgcctcagttaatggagggaatgctggccagctttggttgattatcttactgtttatcgctgcgattattcttttgcggcggtttaagcaaccgtatttatggtttagcaaagtaactaaggcaacgactcaattggatattcggttagccttcttcttgatttttgctttagttactgtagctgagcgagttggtgctgaaaatattttgggagcattcttggccgggatggtaatgaaattattggaaccaagcgaggcaactaaagataagctaacttcaatcggttatggattctttatcccaatctttttcattatgactggcgtgggcttgaatctaaagtcactatttgctcatccatcatcattgatgttgttgccagttttggtcattttcttgttcttagctaaagctcctgtagtttttctttatatgcgctattttgaaaagaaaaatgcctttgctggtggctttttaactgctactacaattacgattgttttgccaactctacaagttgctagaaaattgcatgcaattacttcaacacaatcagatgcctttatcttagctgcggttattgtttgtatcgtgagtccgattgtctttaattcaaactttgttttatcacctgaggatcggatgaaagaaactgttactattgtgggtgccaatacttttacggtaccagttgcacatgatttgcatgataattggtatacgatcaagatgtttaccgatcagcaggaccaatacgaaacttatgatagtagggttaaaggtttaacattacttgataatttggataatcaaagcttagagcgtagtggtgcctttgattgcgacattttcgtagctgcagggcatcatgatcaagaaaatgcacgaatggcggaatatgccaaagacttgggagtcaaacgagcaattgcccgaatgaatgaagtcgatagcaatacgatggctcgatgccaggaggcaggagtagagttgttcaactttactaatgtacgttctgctctgatgcgagctttgattgagtctccaacggtctacaagattatgactgatactaacaatgtgttgtactcagttaaggtgagaagtacttcctatactggacgaccacttagggatctggaatttgtggacaagattacggttagtcgaattcggcgtggtgatgagtggttaataccacacggttggactgttattgagccgaatgatatcttgatcttttctggagaatttaaggttgctgatcgagtaaagaagttacttagtcatcaaaattagagataaaaagaggctaaatgcaaaaatcctgcatttaacctcttttttacgtaattaatgattttgtccttcaactgcttcaatgtcgccttgtccatcgcgctcaacaatagccccaattgcagcgattaagcctttaacaatatcggctaatgccattgatggagtgcttggtcttttgacaacttgttctggcaaaaatgggatgtgaatgaagccagctttaaggctagggaattctttagctcgcatgtattgcacttgataaaagatgtggttgcagacgtaagtaccggcagtgttggaaactgtagcaggtagaccaacagcgcgaatcgccttagccattgccttgattggtagttgggtgaagtaagccgtgtcgccatcggcttggataggttcaccgagcggttgataaccatcgttgtcggggatgcgaccatcgttaatattaatagctactcgttctggggttaaagcagcacgcccaccagcttgaccaacattaagtacataatctggtttttcttgcacgatggcatcatgaacaacttgggcagatttattgaaaaccgtaggaatttctaatttgataatttttgcacccttgattgagtcaggtagttttttgactgcttcaatggcggggttgatcttgtcgccaccaaaaggatcaaaaccagttactaaaattttcaatggcttttcctccaaatttaaatcatagaattttttgctttagtcaaaatttgcattgtctctaaagtattgacaaatgcttcatccgctttttgcgtatcgtgttgatcaatcatctgggcaaaagtattaaattcagctgccattcggtgcggatatttatttaaattataacgcttaggttgctcatttctcatttcaactgtgaaattatcaagtgttcccgttgagccgtcaaaatagatactacctttttcaccttcgataaaagaacgtggcgttacatagctatcttttgatgccgtgagggaggcttgtttgtcaggataagagaggtgaagaataccagaagtatcaacgcctttttgcatgttggcataatattgcacttgatcaggcaagccaaacaatgccgagacaagatgaatgttgtagatatttaaatccattaaagcaccgccatcttttttaggatcaaaaaccggcgcaattttgccttcaagaaaggcgtcatagcggctagaatattgcgtataatttaggttaacaatatgaattggtgcgatcttgttcaattctttttggatttgtttgaagttttctaaataaaggttagtaattgcttcaacgatgatcaaacccttttcgtcggctaacttttttaattcttttgcttgagtggtgctctgaacaaatggcttttcacagattacatttttatcgtgttctagagcagctttagcaatctcataatgcaagaagtttggcaccgctacataaactgtatcgacttcagaatcagccattaattcttcattgtccgtataagtacgtttgatgttgtactttttagctaattcccgggcaatattttcactgcgcttagttgaggaaatagccgttacagtcatattcgcaacttgatcagcggttgttaaaaagtcatggacgatcatgccgctgccaataattcctaatttcatttttttgcctacttctttttagtattagtggttggtaaatctttagcgttagttgcagagtctggtactcttaagaagtcatggctgccgaagttgccataactttgaccaactttaacgtacattaatttacctagtttcatattaacaaagacattaaaggtagataatttattacctttaattacagccttaacattcattgattggtacttgcctaattttttaatttggctgaaaattttagcttgatttgtactttgagcagtagtgtcaaaaattggtgctgctgcctttttcatcaaagcttggtcagtacttttagcagttaaagtataagtgtaaacaccatcttttttgctttttttcattttataagcagaaaccaacttatcacttggattggtgatcatgtggttattcatgatggcatcggttaagtcggcataattatgaccggttagtttttcaaggtcagccttgtaccaagtatcttgtccattaatgtagacattgttaaggttgacccattcctcagtagaactagttttacctttgctagtggtttgattggtgatgtggtaaacagtggttttaccaccaaaggtagtgttagctaaggcaacttgattagaagtgtcggtacccagagtaacagattgaataacctgtcccgacttgaagctacttttagctttttgtacaacttgagtcttagtcagagctgaagtagccttcttctcttgtttactgcagccacctaataaaaagaggacagcaaaggataaaccgataatcgttttcttaagtttcatttttttctcctctatgcttcaataagtctattataactaaaaagtccgttgctcgttggagttacggactattcttttactttattttgtattaattttgcctaaatctacggccgatttcttgatagaagcaggtaccgtcaactttttgacttgattaatttgatcaatctgcatggtgaaattctttttgtgtccttcatccttataagtagaagtcacattaacatttttgatgtcgtaattctgatctacgttaattttgatttcgttgctaattggtttaacatcatcaagatcgatgccgattaaagcagtaaaggcagaatcagatacaattgcgttccaaatttttttgttatttcctttataagtaagcagataatcattgccgttttgctttaccttaaaatattttgcgttagggatgaaaggcatgagtaatgtgccgttcaaattgtcggtaatggcaccataggcactagccttagacaactttgtcttaaaccaacgctgagaattggtacctttcatttggatatagttgcttttaccctcaatccacattttatagtgattagagctgctagaaacattagcataaataatcgttggctttttagtatattgggcttcggctttttgcaaagacttgccattgcttaattcattccaagtagcgtgcattgaactgaatttcgttttttctgcactggttaaaatcgtcttggcagtaggtaaattagctgtcttttttgaacctgtcttagagcaggccgttaaaaagagtaatgctaataaaacggtaatgataatattttgatgtttaaatttcatacataactttctttcattaaattttttcttctagtatagcaagaataacgttacaaaattgaaaaaacacgatttttttagtcttaactctatgaaaaaatttgtgaaatgtgtaaaatatggatgaaacattgaattttaaaaggagatatttcatgtcaaaattagttttaatccgtcacggtcaaagtgaatggaacctttcaaaccaatttactggttgggttgacgttaacctttcagaaaaaggtgttgaagaagctaagaaggctggccgtttaatcaaggaacacggtcttgaatttgaccaagcttacacttcattattaactcgtgctatcaagactttgcactttgcacttgaagaaagtggccaactttggattccagaaactaagacctggagacttaacgaacgtcactacggtgctttacaaggtttgaacaagaaggctactgctgaaaagtacggcgatgaacaagttcacatttggcgtcgttcatacgatgttttgccaccagctattgatgatgacaacgaattcagtcaagcacatgaccgtcgttacgcaaacttggacccacacatcgttcctaaggctgaaaacttacacgtatgtcttgatcgtgtaatgccattctgggaagaccacattgctccagatttacttgacggcaagaacgtaattatcgcagctcacggtaactcacttcgtgctttgactaagtacatcgaaaacatttctgatgaagacattatgaacttggaaatgaagaccggtgaaccagttgtttacacattcgacgaaaacttggatgttgttaacaaggaaaagttggacgactaatttattaagtagttattcacacaaatagaacttcggcgtaagtcggagtttttttatacaccaaaaaaggcatcaccgttaagggatgccttctttgtatcaacttgctccaaaaactataattatttctttgatttcataatttttttggaacaacttcattatattataaataaagaaagatcgccatttttttctaagaaagtggtgaaaattgacagttgtatatgataagtgctattttgagttacaggagtgtagaaattgggagaaaaatatgcaaacaatcgataattctctctttcaagtctctgtcgatgagaatggggcccggatggcacatctggtgtctttaacagatcaatttgattatctcggcgagcaagaaagtgaagaaggtatggcacttgcttttccagtaatggatcaagccgataatttggctaacaagttgccttggaccgttgttgacaaaggtgatactcgcgtaagtctaactttaattgatacgccggagagctataagagttttccatatcattttgaagtaatgactacttatgctttggagggtaatcaagtcaatatatccttttatttaaaaaattcttcaaataaggaactgccattttctttgggctttatcttaccaacttcttggcaaagtgaaagccaggtcaataagattagtttgactggcaaagaacatggcattgatcttacttcaactgattttaagttgagtgcaaaagaaggaagcgttacagcttttacggataaaattgaattagaggcaaaaagtagccgtaattttgcgttaagcttgactttgaagtaaaaattagtaacgattttaataagatatactaagcaagtcagcgatgatttgctttttttgttataatacattcaatgtgaatttacatcataataggtatattttatgaaagatagaaaacaaagatctaatcacccgcataatagtcgggtagacacacacagttataaaaatcgtcatatttgggtctgggttattagtatcgtagccttgcttgcggttgctggagcggcgtactttgcatcagtttatttccgtactaagtcagcggttgataagacctatgatcctaagactgcagtgaaaactacaggtgaatttgatggaaagaagaagttcgctgttttactgatggggactgatacaggtgcccttgatcgaactgaaaagcgcggccggactgataccatgattttagctgtagttaaccctgctaagaagcgttacacattggtctcaataccgcgtgatacgatggcacagatggttggaagcgagagcttcaagacagaaaagattaacgccgcttatgaattaggcggggctaggatgtcaatggattcagtttctaagttaatcaatgtgccaatcaagtattatgccgtggttaacatgggtggaatcatgaagatgattcgctatgttggcggaattaatattagaccaacgcttagctttgaatatggcggttatatttttaaaaagggcaagctgacccatatgggtggtgcaggtgcgctagcatattctagaatgcgttatgatgatccgcgtggagattatggtcgtcaagaacgacaacggcaggtaattaccaccttgatcaagaaggcagtttcaattagttcattatcaaatctggattcaattttgacttctgtgtcaagcaatgttcggactaacttgccatttagtgcgatgcagcagattgcgatgaattatcgtagttgtgccaattcgtcatctagtgattatctacatggttacaatgcaatgatcgacgatgcggcttatcaagtacagccaactagtgaattgcaacggatttctaacctggtgcgcaaagaattagggttacctaaggaaacggtttcaaataatgaaactttccaaaacgaaaagaatattgcaaatggctttagctttaagagcgaaaaaacgcagcactatcatatctatgattacaccgaagaaggtgataattaatggcgcgcatttgggctactctgattggctacgtttttggaaatttcttaacggcgatgatcgttggcaaaatctttttaaaaataaatcctactgaatacggttcacataatccaggaacggctaacatgggtgctgtttttggtaaaaaatggggtattttaacctgtttaggcgatttgcttaaaagtttaattgccttgtttattgtatattttgcttttccagctcatattaatattgcttatacagggctaggcctgatcttaggacattgttttccaatctgggatcattttcgaggtggcaaaggagttgcggttgcagctcaggtagcagttttttataattggaaagctggctttgctactttattagtggctttggtattaacagcaattatgcaaaatttgacgattccgcctttagtgtttatgcttttattcagtataaatacattcttgcataatcaagaagcaggatttgtttttatcgtgattactttgatcatgtgctttaagttctggcatgatatcgtagactttttcaccggtcatggcaaaaaggttgatattctgctttcaattaaaaagaagctagggatcattaagtaatgacagaaatttttagtgaggacacagactagagaaaatgagtgagattaacaagaaaaaatcactaaatgctcttcaaatcatttgtttgattgtcgtagcattctttatgctagtgcagatgtattcttggggtagcacttttggtagattaccattaagtaccctaatgagatttattccaggactacttggtcacagtacgatggtactagtaccaatggtctttggtgctgtttatagcaaaagaaaggttcatccaactgaagcctttaagttttggattatagcggttgttacactagtgcttttatacttggtgaacttctttaaacgaccaggtacctttaatatgtggaagctctggggagtatttttcccagttttgactagtacatcagtattgttggctggcttgatttttagtatgctagttcaaccatacttgtatgaattacaacatcgcattactactaagcaaaatgtattattgcttagcgcattaactttgactggttttgcgactagtgcaggtacaatgatctttaacaagtcaatttatggcatttatttgatcttgtactttgcttgggggatgtttttagctaacgttaaaattcctaaaaaggtctttggctggtcaattgcagctggagtaatgtctttcttcgtaatgtttatcggtattcccggatttaatggggtttactggtaccaacgattatctggtcgaagtggcgtttattcctggaatcctaaatttttaagtaatattgcttcaccatttttgttcttaatggttttagcagccttcttaatctttagaaaagtgattgttagctatagtgctaagcagatgcacttctttattccagtaattatttttatggacgctccaattattggtggttttgttaaatcgttccgctttaccaatagcgctggatttaacaagttcttgatgattgtcatcatgatgctagctgcctggggcttaagctggctatatgagcgctatttattcaaggtgaagccggttaaacggacggttgcttttttcaagcaacataataacttagcagaaattgttgaagatgcttggactaacttcactgcttggatagttgaaaatcgagtacgactacttacatggggctggttctatgtattaagttttgcttcattcttaattgaatcagataatctgcggatccaaattacgactgcaactgatatcaatgccgtaattttcttgctcgggactagattcttcgctattattttgacagcaatcttccttgatgcaatgtttgcaattttctacttcattactacgcgttactggacttcaacagttttagtaactgtaattacaattggttgggctattgccaacaagattaaattagatcttcgtggggaaccaatttatccaactgaattagacgaaattgttaactggaagaccttgatgccaatggtcggccaacaaaagataattatgatcgctattgccttagtaattatcattgcattgactgtctttcttgcaattaagtttccaattaagaaaaagggctcatggaaacgccgtggtatttgggcattgttgagtttgcttttgttcatgacaccagtgcgctttaaccacgatggcggaattatttatcacattaaccgtggctttgataataagcaatcgtttagaaaccctgaacgtgatattcaaattaacggtccattattgaacttcttgaattactttgacctgcagattatgaataagccaactaactattcaaaatctacaattcaacatttgaatgagaagtacagcaagatcgctaatgaaattaacaaaacaagaaagaatactctaaagaatcaaactattgtttacaacttgagtgaaagttttggtgatccatatactttcccaactgtaaagatcgatcctaaggtgccaaatccagttaaatttattcaatcaatggctaagagatctacttacggtagcatgcttagtgcaggttatggtggtggtactgccaacatggaatgggaaactttgaccggtttcaacatgggaatgttcaagtcaaccttgacgccatatgttcaaattgtgccaaaccatgatttctatccaacggtcggaatggacttcaattataagtctgcagttcacccattcattggtacttactactcaagagtagaagactataagagatttaagtttaataagtttgtttaccttggctctaaatataagatcattgatcaaaagaaacttggtaaatcaacttataattctgattacactacttatgcaaatggtttgaaacaaatcaatagcatgaagggtggtcaattcattaatttgatttcaattcagaaccacatgccttacaacaattggtatccaaacaatgaatacatgggcaaggtatctggtgaactcttcaacactgctgctattcgtgaacaaatggcaacttacatgaagggtgttcaatacactgataaggctgtaaagcaatttatcggtaagattgataagatcaagaagccaatcacagttgtcttctatggggaccactacccaagtatcttgtcacaaaactacgctagtcgttatccagtgcaaatgcactcaactcgctacttcatttattctaacaagtatgctagagaacatggtgctaagagcaagttgactcacaactctaattacgtcaacactagtgactttactgcaatgatgcttgaacaaactaattctaaggtaactccttaccaagcattgttaacagaagttcacaagaagttgccagcaatcacgattaacttcaatggtgatcaaggcttccaattagttgaccaaaaggggcacttcgttgatccaaagaaattgacttcagaacaacaagcaattttgaaggattacgaaatggtgcaatatgatatgactgctggtcaagcttatggcttaaaagctaagggcttttacaagatcggtgactaaataaaagagatcgaacgtaaagttcggtcttttttctacgtaaagtcaagcgcaataaggtgtttggctttattttttacctaaattttgtcatgagtatcttttagtggcgatttatttttttagaaagcatactaaataagcccacctctatatttaatttatgggcttagcgttataatgtacttgatcaattaattacaactaaagtctttttggttatgtgtggctacgttgtaatcatatagttgatcattgataatcagagcataaatggttctgattagtttatgaattgaagcaatagctatctttttgaaccctttggtttgagaggatagctttttgctttcataataatctgctatatgacacggatttgtcttagctgcattatcaatttgtccaatagctcgataaagcaacttacgtgcgactgcattgccatgtttagtaatacttaaattagagtccatttctcctgactgatatctgcctggatcaattccgataaaagcattgattttattaggattactaaatctgcgtaaatctcctaactctgctaaaactctgacagcagtggtctgtgcaaagcctggaatgctttctaggttttctaaatcatgattaggcaaagacttcgctaacttaaccattcttgcgattaaattttctctttgatcacttaaattaagcaatctgtgtgcataatactgcacttgctcgacttctatgctagagcaagatacaactggataagcttgataagctaattcaattaatttatctgcagtccttagagcgtgtttaaaagcaatcccctttaagctcattaaccagttaataagctgttttttatcttctcttcttactaagtcacaatgaggatatcgcacaactatttgccagtaatttttacctttagcagaagaaaatagattttcaatttcagggaaagtcgattgtagagcttggtgaagtcgatttttagccattactaagtcagctgttaactggtcatagaagcggctcaaagcattaagctgcttataagtttgagattgaagttgattaattggatgatgatatagtctttgaattaaggccaaatgataagcatcagttttatcagtcttattatgacgtagtcccatatccatttcttttttagctttaagaggattaagaattacataatcatagccatagtcttccagaaaagattgcagtgtacgtgaataaacaccggtagcttcaaaaataatttgcggatgtttagaaaaagcggttaattcatgaagcaattgaataaaaccaggacgattattagtaatggttagttcatttttgctttcaccaattagttcacaaacagtagaagtagacttgcttacatcaattccaaaagtaacttgcataataaaaacctccaaaacttagtagtaaaacgtatttacttaagaaatcagatctaattttctaaactcgacatctagtgtccacattcttcgaagagactattgaaaacttaagtaaaactgccagtttattatgcgacatcaagtgtctaaagacctcagggcatatcgttttactactactttaattctacaaaagaataaaaatagtgaatcaattatcccgtcggataactaattcactatttagcttagaatgttttgtatccaatgataaaataagggctaagaggaataactgataattagctgatttaaaggtgattagaatgaaaaagataataacaatggcactagccagtgctgcactatttggatcttctgcaacaactgttcaagctgggacatataatcctaagaacattaccagttttaatattaataggcgtaactatgtagctaagggaaagatttataaactccatttacccgcagctggtagattagttactaatggcaatgttactttaaaaaatagtatggaatggacctgtattccttatggtaaggacaaaaatacgtattatctgcgtaaaggcacatattatttaactagttcaaagaatattagtgtgaagactacttatactcgtttaactaagatccgtaagaatttagaaacttacgttgaaacaaagaagaataatgacaacagtagtcttaaagctagaaagattgaaattggtcaagatattaaagcaatgggtgaaatgtacgattacgatagtgtcgactactacacatttactattgactcacctcaaatggttacgatgaggatgatcaataatccgatttatcagcttggaaaaggtaacattttcagcaagatgaatgtaatcatgttcagtgaaaataatccagttggcggtagtacgatgctttacccagagagtttcgaaattaatggcaataagattgctagtcaaagctggtacttgtctaaaggaaattatacttttagtgtaaatactcgtggactttataattttcaattaacggctgttcctgatacgcgtgtggtaccggcagatactgagatagaatctttacaaaacactaaggatggtatggttgctaacttaagggatgcacgtcatgcgaagacttatgaacttgcatggcgtgaaaaaggctcaaaggcagctccattcacttctagtagcaatactacagaagtaagtactgcacctgctacacgttacatagacaaaaatgatcgtaaaatcccagtttcaattggtaaaaaattagttaatggtcaaagctactattttgtagctcgcggtgtaagcaatcctgattacattcgttacggcaatccggaaaaagataattattttggtgcttggagtaattcagtagaacacacttactatgcaccttcagatgcaacaccaggtgcagttgatttaaccactgctaaagctgacagtacttatcacaacattcatgtggcttggaataaaattgctagtgcacaaagttatcgcattgcctaccgccaaaaaggtacaaataagtggtactatgaagtaactgatcaggctactaacgcgattactggtattactagaaatagaaattatgaagtgaaattgcaagcattgaatggtgaaaaaactggtccatggtccgcaattaaaacaatttttgtaaaatagcggttgactaaaactatttttctcgttaatatcataactaacaaatgagtagcgagtcggctcagcgttcagagaactagcggttggtgtgagctagacaggccgattttagcgaagtacttaatagggttgctcctttaccggcttgaataaggcgcagcagcgcaaacgtgggtggtaccacggctaataatgtaatttagtcgtcccttggtcttttgaccaggggacgttttttattggaggaaaaactatggcaaaatttgatattttggaagatttaaaatggcgtggtgccattaatcaagaaactgatgaggaaggtttgagaaagtacttagcagaacatgacgattgggcattgtactgtggtactgacccaactggtgattcccttcatattggacaccttattccattcatgatcttgaagagattccaaatggcgggctaccatccagtaattttaattggtggtgttactggtgcgattggtgacccatcaggccgtaagactgaacgtactttacaaactgcggaacaagttaagcacaatgaagaaagcttaactaatcaaatgaagaagttatttggtactgaaaattttgaaattagaaacaatgctgaatggctaagcaagcttaacttgatcgacttcttgcgtgattatggcaagttattccaagttaacaatatgattaacaaggatgttgtagctagccgtcttgaaaatggtatttcatttactgaatttacttatcaaattttgcaagcaattgatttctaccacttgaataaagatgatggtgttcaacttcaaattggtggtagtgatcaatggggtaacattactgctggtattgatttaatccataagcttgaaggcgcagatcgtccagcctttggtttaactattccattgatgcttaaggctgatggtactaagtttggtaaatctgctggtggtgctgtttggcttgatccagaaaagactagtccttatgaattttaccaattctggattaatcaagatgaccgtgatgtggttaaatacttgaagtacttcactttccttagccgtgaagaaatcgaagatttagctgaaaagactgagaaagaaccttggaaacgtgctgcacaaaagaagctggctgaagaagttaccaagtttgttcatggcgaagcaggtcttgaagaagctaaaatgattactgatgccttgttctcgggcaatatcaagaacttatcagttgctcaaattgaacaaggcttgaagaatgctccaagtgcggaagctggcaatgaaaagaagaatattgttgatttcttagttgacactaagattgaaccttctaaacgtcaagctcgtgaagatgtaaagaatggtgccatttatgttaatggcgatcgtgagcaaagtactgatttcgaagttgatccatcaagtgactttgatggtaagtacgttattattcgtaaaggaaagagaaagtatactttagttacaattaaataattaaatatatgattttaacattttatatataaaaatagagggattttttcctctatttttttagctaataatcggagatatttactaccaactaatatttgtaaaagataaagataatgatttgtgtaaaataatattttacttcttaaattgttattttattttctaaaatcaattgctacaatctatttattaagttattcacaaattcacattattactatacaatttgttatttcaagtgtaataccaatataaaatagctgcgtataccttttgcaaatgctgatgcaaagcactctattaaaaactgactcttaataaaaatatgtgaaaagcagcactatctgctttacttctaatcaaacagtgttatagtaatagtgtaaagagaaagtaagtaaatagaaagaggttattaaaatgttagaatctaagaaagctattaagattatttcaagtttggtaatcggtttgagtttaggctgtgttcttactcctattgctcaagctacttcatttactgctcctaaattgggtactgcaacacaagctccaaccaatcctgctattaaaaagggtgataagatctttgttgttattaaagacaccaaaaatcaaaaagtagctgtttacaataaaaatgctgaaaaaactagcaaaaaagttgcaatgggttctacttataccgcaaaagacgttaagaaggttaataaaaagaagattgttagaatcaacaagagtcaatggttgaatactaaagacgtcgttaagaactaaataaaagcaaatttaataaccgttttgaatacttattttctaaaaatacttggagagaataaataaggacgaggatgttcaaatgaatgtcttcgccttttttggtataatgaagacgccgctttagctcaataggtagagcaccgccgtggtaaggaggaggtccccagttcaaacctgggaagcggcttagttgttgtttttggcaagaaaggaaaaattttatgaagcatgaacttacaatgaatgaaattgctaaatttcaaaaagaatatgagcaaaaaccacaaaatcgggttgcggaattggctgttgttaataatggtgtggctaaggctagtttggattcagaaaaggttaggaaattgaaccgcactttttcaattgaaatcccaactgataatgttactgatcaaaagcaatcgggtcgctgctggctatttgcggccttgaatacattgcgtcatggttttgctaagaagtataatgctaaaaactttactttttcacaaaattatttattcttctgggatcgaattgaacgagcaaatattttctttgataatattttgaataccgcagatcgtccacttagtgacagaacagtgcatacttatatgcagggacctgatactgatggtggccaatgggctatggctgtttctttgattaggaagtacggcttagtgccaacctatgctcaagatgaaagtttcactgccaacaatactgctttcttcaatcgtattttgaataataagttgcgagaagatggacttgtgttgcgtaagttagctcaagcaggtaaaaatgatgaaattgaagctaaacgtcaagaatttttgagtgaggtttaccgtatggcagtaattgctttcggtcaaccagtacaaaaatttgaccttgagtttaaggatgatgaaggtaagtatcattttgatggtgatcttactccacttgatttctttcacgactactttactgatgacttggatgactatattgttttgttcaatgcaccagatcatgaatttgataagctgtatgctttgccatttgaagacaatgtagagggcggaagtccagttcatttcttaaacactaaaattgaaaatcttaaagaagctgcgattaagcaacttgaagcaggcgaaactttttggtttggttgtgatgtaggtaaagatagcgatcgtcaaaagggaattttagctcataacctctatcaaactgatgctatttttaatattgaaactaagttaagcaaaaaagagagactggaaactggtgcttcgggttcaactcatgccatgacgatggttggtgtggatgttgttaatggaaagccacgtcaatggaaaattgaaaactcatggggaaacaaggtcggtgaaaaaggctactttgtgatggatgataactggtttgatgaatatctcttcaaagtagttgttaaaaaacaatatgtaccggaaaaactggttaagatttgggaaggcaaagcaacgccggtaaaagcatgggactcaatggcataatggaaattaaacaagttatcgattttactcaaacacacttaaagaatgaaaaaacgggtcatgatttttatcatggcgaacgtgtagctaatttggctagtcaaatgtatttagcagatcatgctgatgctcatgaagatagccgggtagttgctattattaaaacagcgggttatttgcatgacacgattgatgaaaaaatatgtgctgacccacaaaaggtaattgatgaaattaaagttttattgccgcaagtagggtttaatgaactggaggcatgggatattttattcaccattcaacacatgtcattttcagctaatattgagcatcactatcatttgcctttatctggacaatatgtgcaagatgctgatcgtctagaaagtttgggtgcgattggaattgcccgtgcctttacgtatggtggtaaacatggcaataagatttacgatccagagattaagccagccgttttaactagtcatgatcaatatcgtaaccatgtcgaaaccacaatcaaccacttttatgagaaactttttcatttagaagatttaatgaatactcctgctgccaaaaaagaagcggaaagacgaactgcatacatgcgcgactttgtacgtgaatttatgcaagaatggaatgtttagaataatttaattttgaataagccttgatacatcagcattgaggcttattttttaaataaattaaaaataatattaaaaaaaacttgcaaagcaaaaaatatttagctatacttataaacaacttaaagagttctattaattttctcataaacgaggggagcaataatatgaagtttaccaagttattcgctgcaggagcaaccgttttgattgctggctcaacattagcagcatgtggtagtaattctaattcgtcaagttcatcagctaagaaaacaattaattggatggattcggctgaaattccaacgatggacatttctaaggcaacagacgttaccagttttaaccaattgggtaacgttgaagaaggtttataccgtttaggtaagaattctaaagttgagaatgctttggcaacagataccaaggtgtcaaaagatggtaagacctggactttcaccttgcgtgattctaagtggtctaatggtgataagttaacggctaaagactttgtttactcatggcgcagaaccgttaatccaaagacggcttcacaatatgcttacctcttcgaaggaattcataatgccactcagatttctgcaggtaaggcaccagttaatagtttgggagtaaaggctgaaggtgataataagttagttgttaccttagacaaacgaattccatactttaaattattgatgggattcccattgttcttcccacaaaaccaaaaggtggttgaagctaatggctctaagtatggtacttcatctaagactacagccttcaacggaccttttgtacaaaagggctggactggttctaacctttcttggaagcttgtgaaaaacaagaattactgggacaagaagaatgttaagcttgatgctattaattacagcgtgcaaaagacaccatcaacagcttacaacttgtaccaatcaaataagcttgatgctactattttagattcacaacaaactaagaacttaaaacatcaaaagggttacactttgcgtgatactgcagcaaccttctatttgcaatttaaccaaaagaagaagattttcaaaaatgccgacttgcgtagagcaatctcaatgtcaatcaatagaaaggcactgggaagtgctttaggtggcgctaataccccagcaaccagtttaacttcaaagggtgtagttaaccatgatggtaaggactggtcagaagttgttggtgataagaagaacgccgcatataacccaactgaagctaagaaactttacaagaaggctttgaaggaattaggcgttaagaacgtttcatttacaatcctgtctgatgatactgattcaggtcaaaagacgactgaaacacttcaaagtcaattagaagaaaacttgaagggcatgaaggtttcagtagctaacgtaccattcaagactcgtttgaaccgttcaactagtggtaacttcgatgttgttgtttcaggttggtcagctgactttgccgatccaatttcattcgttgacttgtttactagcaagaatgcacaaaataacggtaagtggagtaactcccaatacgacaagttgatcgctgattctaagactacagcagatacaactaagcgttgggatgaccttgaaaaagcagaaaagatcttgcttagcgatgaaggaatcgccccactttactacaagactgaagcttggttagttcgtccagacattaagggcattgtctacaatggcgctggcttaaactacaacttcaagaatacttatgtagcaaattaattaaaaaatcaggaggacatagtaatgattattatttcagcaattattattttacaaacaagacataaaaataatctctcttcacttgtaattgcgtaataatagtctagctatgatttgatgaatagatagaaggagcaaccatgtgaaggttgctcctttttgtaataaaaaagaatgagggtcaaaatgaaaaagtggaaaaagtattttagtgcaagtttattaaccgtcgtatcagctgcaactttggcagcctgttcaaataaaagttcgtcatctggtaccaagcaaaccttgaattggatgactaaatcagaattacaaactttagatttgtccaaggtgactgatgcaactagtttagatcaaattaataattcgatggaaggactctatcgtttaggtaaaaattccaaggtggaaaatgctttggcaactaagactgaggtatcaaaggatggtaaagtgtggcattttactttgagaaagaatgccaaatggtctaatggtgatccagttactgctaaagatttcgtctattcatggcgtaggactgttgatccaaagactgcctcacaatatgcttatcttttctcaggagtaaagaatgcggatgatgtagtagcaggaaagaagaaggttgaaacactcggtgttaaagcagatgataaccaacatttaaccgttactttggatagaagaattccatactttaagctattgatgggcttcggggttttcttccctcaaaatgaacatgccgttgaaaagtatggcaaaaattatggtacctcatctaaaacaatggtttataacggaccatttgtatcaaaaggctggaccggttcaaacttgtcttggaagctagttaaaaataaagattactgggacaaaggcaaggtaaaactaagtaagattaattacagcgtgcaaaagacaccatcaactgactataacttgtatcaatctggaaaattagatgtagcattattggcaccacaagctacaaaacaattgaagaaccagagtggttatacaattagaccagcttcttcaacacaatatttacaattaaacgaaaagaacaagcttttccaaaatactgacttccgccgagcattatcgttatcggttaatcgtaaggcattagcttcagctgtaggtggtgctaacaagccagtcactaccttttcaccaaatagtatgactgaagtaaatggcaaagattatactgaattagtcaaaactgctgaaactgataagttaatgacatataaccctactttagctaaaagttattggaagaaagcacaaaaggctttaggacagagcaaagttaacttcactttgctaacctatgacgatgatgatgccaaaaaagcaggtgaatacttgcaaagtactattgagtcaaacttgaaaggcgttaatgtcagagtaaatagtttacctaaaaagactgccttagttcgtggtcaaaatggtaactttgatgctttactgatgggttggcaagctgactttactgatccaatctcattccttgacttgaacacctcaaatgcttcatacaactggggcaagtgggctaataaggaatatgataagtatgtagcagcttctaaaactactggaaacgaaaatactcgttttgaagacttagctaaggctgaacgtgtattgttaactgagcaaggtgtagtaccactttaccagccagcagaagcttggatggttcgtccaactgtcaagggcgttgtatataatggtgctggagctaactataacttcaaatatgcttatgttgaaaagtagactaaaatcctaaatatctaaataatagaacttataacaataaacaactcctctatgtaattaaaaagcagaccgaaaaaatccaatgtcattaagttaagacattgacaattaagggtgcttttttagagatcgaatcatttggattcgatctctttttttgtataaaataaaggcgaaaagaccagccttttcgcctatcttatatattatatattttaaaccttcaaaattattgccagaaagatggtgttaattatgaaagcccttcataagaatattctagaacgtcttgatcaaattatcaataatactggggatcatattcacgattttattaataatcctcatgcttttaccaggaaacgcactttagatgcagcgacagtccttaaaactacaattaacatgcaaggtcagaatttaaacagtgaactctttagagcttttggcgaagatgcaactaaaaagaacgataaagtagttagtacttctgcctatgttcaacgcaaaagccagctttctcctgcttgttttaaacatattctgactgtttttaatcaaaatctatttaatattcaactttttgatcatcactaccgtttgtttgccattgatggctctgactttaatcaaatctggaatccgaaatcgaataacattgtacaagcttcttctcataaaaagaaaccctattgtcaaattcacgttaatgccttatatgatctattgaataatacctaccaggattgtatttttcagcctaaatcagaaatggatgaacgcaaagcggctgttcaaatgcttaaagctttgaattgtggtccatatattgtaacaatggatcgtggctacactagtttcaatatgattgaaaactgcaatcgcctgcctaactgtcattacataatacgaactaaggctggacaaggcggagttaaagaaataacgacattgcctgatcaagaatgtgatcgtgagatttcctgcctggtaactacttctaactattactacatcacgcataaagccagtgagaatattcaccatgtccagcatcattatcgccaatatattaagtatcgctctaaaaatacccaggatctaagctgggattttggcgagttatgcacaataaaatttcgagcctgcaaatttagaattaatgatgccaaatcaggcaaagaagaatgggaagttgtgctaaccaatcttgatcgaaaaaattatccgctaaaaagaattaaagagctttatcatctgcgttggggtattgagacctccttcaagaaattgaagtattctttaggcagtgtacagttccattccaaacaagataaatttattgaaatggaaatttatgcccatatgattatgtttaatgcaatcagtcaaattgatgcacaggcctatattccgcaaaagcattgcaagtatcaatatgccatcaatttcaagcaatcatgcttgattattcagagcatgtatttggcttcttctttaacgcaagattttgaacggatccttattcagatcagctattataccattccaattagaccaggccgcaaggacaagagaaatattaagcccaaatcagctgtatattatttatatcgcgtagcttaaaaaagcagaatctgtgctatgccttatttgttgtacgaaaaaagcaccaatttaaccaattaaatgttaaatcagtgctttaaaagtctaatattaattgtcaatgtcttaacttaatgacattggaaaaaatcggtctgctttttgattttcgcttgaaaaaagcaagttaggctagtaaagtaaaactaataattttttgaatgagaaaaggagagcttaaatgtcaaattgggatacaaaattcgctaaaaaaggtttaacgtttgatgatgttttattaattccagcagaaagtcatgttttgccaaacgaagttgatttgagtacgactttggcggataacattaaattaaatattccattgatcagtgcagggatggatactgtaactgaaggtgcaatggcaattgcaatggctctccaaggtgggctaggcgttgtgcacaagaatatgtcaattcaagcgcaagctggtgaagtagccaacgtaaagagcgtagttgtgccaactagtgctgcaaaggccgcaactgatgatcaaaaccatctgctctgtgctgcagcagttggtgtaaccagtgatacttttgaaagagcagaagcattgcttgaagctggtgctgatgcgatcgttatcgatactgctcatggtcactcagctggggtattgcgcaagatcaaagaaatccgcgatcattttccagaagcaactttgattgctggtaatgttgcgactggggatgcaactagagcactgtttgatgctggtgttgatgtcgtcaaagttggtattggccctggatcaatttgtactactagagttgttgctggtgttggtgtgccacaaatcacggctatttatgatgctgctacagctgcacgtgaatatcacaagccaatcattgcagatggtggaattaaatattcaggtgatgttgttaaagctttagcagcgggtggcaatgctgtcatgcttggctcaatgctatcaggtactactgaagcacctggcgaaatttttgaagataatggcaagaagtataagcgctatcgcggaatggggtctgttggtgcgatggcccaagcacacggttcaagtgaccgttacttccaaggtggcgtaaacgaagctaataaacttgttccagaaggtgttgaagctcgagtagaatataagggcgatgtttctgatgtagtctttcaaattgatggtggtctccgttcaggtatgggatattgtggtgctgcaaatattccggaattaattgataaagctcaatttgttcaaatcactaatgcaggtttacgtgaatcacatccacatgatgttcaaatgaccaaagctgctccaaactatacaaaatagatataataaaagttaaaaataagagagaaagcaaaatttctctcttatttttttaattttttggacattttaactagatatatttatttcttttggtataattaaaacaacattaaaaagtaaatgaaagcataaaataaaatgagggagcaattaatatggctagatacctattaaaacgtatattttatatgatcctcactttgcttatcgtggctacggtaacttttttcttaatgaaattgatgccgggttcaccttatgctaatgaagcaaagatgacgctaactcagcggcaaattatggatcaacagtatggtttaaataaacctatctggcaacaatatttgatttatattgcggggatgcttcacggtgattttgggacatccttccaatatagtaaccaaccggtagcttcattaattggggcgcgtttgggtgcgtcagtacaattaggtttacaagcattaattttgggagttgtccttggtgtaatcgctggggcaattgctgctatgagacagggtacttgggttgactcaactgctactgtaatttctattttgggtaaatcagttcctaactttgttttagcagttttgcttcaatactacatcggtttaaagctaggttggttcccaattgctggttgggggcaattttctcaaacgattatgccaacgattgctttggcagttggaccatttgcggaaacagctcggtttatccgaaccagtatggttgataccttaagtagtgactatattgagttaggtaaggccaagggcttaagtagaatggaagtcattagaaaacatgcaatgcgtaattcaatgattccattagtaactctgattggtccttatgctgtagccttgatgactggttcaatggttattgaaaatatctttaacgttcctgggattggtgaacaatttgttaagtcgattttgactaacgactatccaacaatcatgggaattacgatggtttactgtattggattagtagtaattctgttgattactgatattgtttatggattaattgatccaagaattagattagatgaaagcgaggcctagaagacaatatgactgaagaaaaattaaaccttcctgcagatgcctttgaacccttatcaaaagatgaagcacaggataacgaaaacattgcaggtccatctttatcgtttgcacaaaatgtttggcttcgcttcaagcagagaaaagcagctattatttctgcaattattgttattttgatgattgtagtagcttttggttcaaccccattcatcaataaatctactttagttaaatcgcacccacaatatgccaatttacctgctaaagtgccaggaatgagcgcaattaacgggttgaacggtaagattaagcaaaatggcaagtgggttgatgcttatgcccagaatggcgtgcctaaagataagtattttatcgcaggtacagattatttaggcagatctttgggacaaagaattatctatggtacaaagatttcattgatcgtcgctttagttgcagctttctttgatttaactatcggagtcgcgtacggaatagtgtccggctggaaaggcgggggagtcgataacgtaatgcagcgaattatcgaaattatctcttccgtgcctaatttaatcattgtagttttgatgttggtggtattaaaaccaggtattaagtcaattatcttggcaattgctatttcaagttggacgacaatggcacggcaagttagagcagaaactctgagtttgaaaaatgaagaatatgttttggcagctagatcattaggtgaatcaccttggaaaattgcttggaaacacttagtgccaaacctttcaagcatcatcattattcaaacgatgtatactattccaactgccatcttcttcgaagccttcttaagtttcatcggaatcggtatttcagccccagaaacttcactaggtgtacttttgaacgaaggacaaaagaattttcaattcttgccatatcagatgtggtatccagcaatcgtattgtgtgtgttgatgattgcctttaacttattaggtgatggtttgcgtgatgccttcgatccacggggacaaagatagaaaggattaacctaaatgccagaagaaagagttttagatgttaaaaatttaaaaattgatttccacacttatgctggtgaggttaaagctattcgtaacgtttcctttcacctaaataagggagagacgctcgcaattgtaggagaatcaggttcaggtaagtcggttactaccagaagtattatcggtctgttagcacgaaatgctcagattgaagacggtgagattgatttccacggcaaaaatttgctagagttatctgaaaaagaaatgcaaaaaattcgtggtaacgaaatttcgatgattttccaggatccaatgacttcgcttgacccaactatgaagattgggcagcaaattgcggagccattaatcaaacataagggtgcctctaagaaagaagcttgggctaaagccttggaaatgatgaaggccgtgggaatcccaaatgcagaagaacgaattaatcaatatcctcaccagttttcaggtgggatgagacaaagaatcgtaattgcgattgctttaatttgtgagccagagattttgctggctgatgaaccaactacagctctagacgtgactgtccaagctgaaatcttggacttgatgaaagacttgcaaaagcgggttaagacctcaattattttcattacgcacgacttgggcgtggtggccggtatggcagatagagtagctgtaatgtacgctggtgaattcttagaattcggtggtgttgatgaaattttttatgatccacagcatccatatacttggggcttaatcaattcaatgcctactttaaacagtgatactttggagtcgattccaggtacgcctcctaacttgcttgatccgcccaagggtgatccttttgcaccaagaaataagtatgccatgaagattgatgtggaaagaaagccacgatttttcaaggtaactgatactcactatgctgcaacctggcttttagcaccaggtgcacctaaagtggaaccaccagctgaaattacacgtcgctggaaaaaatataacttgatgaaacaagaagataaactgccagaggttaactagtcgcggtaaaggagatttttatgccagaaaaaaagaaaattttggaagtaaaacatctaaaacaatactttaaaaatggtcgtaatgtcaccaaggctgttgacgatgtaagctttaatatctatgaaggtgaaactttcggcttggtaggtgaatctggttctggtaagacaactactgggcgctcaattttgcaattgtataagccaactagtggcgaagtgatttttgaaggcaaaaatgtagcagatttaaaaagtcgtgcagacaaactagcttttacacgggatgcacaaatgatctttcaagatccttatgcttcacttaatcctagaatgactgttgaggacattattgctgaaggattagatattcaccatttggttaaaaataaagatgaacgaactgagagagtagaggaattattggaaactgttggcttaaatgcaagtcatgctagccgttttccacatgaattctcaggtggtcagcgtcaaagaatcgggattgctcgcgccttagccgtagagcccaaatttattgttgcagacgaacctatttcagctctagacgtatcaattcaagctcaagtagttaacttgatgattgaattacagaaaaagcgtggtttaacttacttgttcattgcccacgatttatcaatggttaagtttatttctgaccgaattggtgtaatgcactacggtaaactactggaagtaggtccagccgatgacgtctatgatcgaccacttcatgattacacgaagagtttgatttctgcagtgccaattcctgatccagaagttgagcggagccggacaaggattccttatgacgctcaaaaagaagaaatggacggaaagcaacgctcaatgcatgaaattcgtccaggacacttcgtacgctgctctgacgatgaagtcaagcattacgaagaagtagcggcaagctacgaaaattagataccaaatctaatgcaactctctctatattaatattatatttatgctaaaaaggcgatccgatatggatcgcctttttatatgatcattgctcgttaagctaatgaatcccatgctggtaggtcagtgattggaccttcagcgagcttcttttggttttcagttaagtacttcttgtggactacaacttcgtaaacatagtccttaaaccattcattattcatgacgtagaagcctttaacaccagatttatcgccccatgagttctcaactttccattgacgaacttcgccgttgtcttcatcaacaccaactaaagtcatggcatgtgacacttgaccgacgccggtctttaatctgtctgctttagacattttaaggtcaacgccgaataagtcatctaacttgtacaaattagtgtcaaggtaaccagttttacggtccatttgacgtaaaacatcgttaccaaaccaaacagcttcgccgtcttttaattgagcgatagcagcgctggacaagtattccattggtacattcaaaagcttgattctcagtgagccttcaatgttgtcttcagctggtagaccataaagcttgttatagtcatggtctggagcattggttaaaacaacatagtcatcaaaatcaacgccgcccatgtacttgtgtaaaaactcaagtggagttaggttcttttctaaatgatatttcttgtcgtcatcacgatattcaagatcgaaagtcttaggtggttcacctactgcgatagcagtcatttggtaaacttcgcttaaaaatttttcgcgaacctttttaatttcatcatctttgccgtattgcttcaagtggcgcaatactaaagcatccttctttaacttatcgcccaaagcagtagcaaaaccagttgtatcattggtgttaaaagtttctggcattgcatatgaaggaacaacaccatatttttcaactaaagcggcagccatttggaattgtccaccatcactaccagcaaagtctaagtcagccttaacttgacgtgaatcaagtggcatgtcagcactgtctaagattctgttgtagaacatgttagcacgttcgatcttatcccagaagaagttgtaagcttgtgagaaggtgaagtccttagccttatatttcttaccaaaagcgtggcgcaaaacgttcaaagtcgcaaacagccagcaacgaccagaatgtttttggttagtgacattatttgtatcaagttcagttgaaaagacgcgggttaattgtccttgaacacgatcattataagatgcttcaagtacaccactgcgttgagctgcacgagcaacgactttattttcaggttttttattaaattcggcagagaacttttctagttcctgcacagttaattcatgagccataaaaaatctccttttcattttataatttttttctcaatttaattctattttaaagcaaaacaaaagcgggttcaatcagaactcgcttgagagaattattaatccgtcaacttattagatttcttgcctatatctaataaattaatcaatttggatagaattgccatcattgccagcagtttcctttggcaaagtgatggtcaatacaccattatcatactttgcatgaatctcacttgcaactacatttggtaatctatagcttctagaaatactgccctcacttctttccttatgaatgatatttctatttttatcgctagtgtccttaaatgattttcttgtgccgctgacatttaacgtaccgtcattatagttaacgttgatatcctgcttatccatgccaggcatgtcaatcttaactagatagtccttatcagtttctgcaacatcagattgcataatgttttcaatttcattatcgtcaaagaagtttcttggaaaaccaaaccaatcattcattgcatccatcatgtcgttgcgccgattcatcatatcgtttgccataaataaaacttcctttcatttttgtatttgcttaattagaatataaggaaaagatcaactcatttcttgatctcttttctccttacactgtttattgtagtcgctttttatagaaatgacacaaattagcacttaaaaatttatagtgctaattttagactgataacgctgctacaataacattttgagattatggataattattacgtataaaaaaataaagaaagtttgtgaaatagaaatggtatattttcagaaaatgactccagaaggctatcaacaaattgaggatgaaattgctcgattaaaaaaagatcggccacgtagaattaaaattttgcaggctgcacgagctttaggtgatctttcggaaaatactgaatatactgaagcaaaacgtgatctaggtcacttacaaagtcgtctgcgttacctaggcaaacaattaaagtatgccgaaattgttaaagctgaagatgatggtaaggttgatctaggaaagaccgttgtgcttaagtttgatgacgatgatgaaacagaagaatacaaagtggttgggcgaatggaagcggatcttgctgctggcaaggtttcttttgattctccattgggtcaagcaatcatgaaaaaggaggctggtacaacagcaacggtggctgcaccagcaggtgaatatcaagtaacgattgtggaagttaaataagttgagaactataataaactgtctttttctggtataatatgggttttgtaggatacaattcagagtaggagtgaagaatttgaatacgccacaatcaagagagggtaatgtgatccgctatgccgtttatttagctggctatgtcgctgtgtttgcagtagtaaagctagttactagaaaatctccggttcatatttgggatttgattttattcggcttagttgcagccatgattctattgttttatgtttatcgtttcaatcgagagcaacgcttttttgcccgtgattttaaacttccatggttgggcagtttgtcaactgttgttctattaacattagtgattacagttacacagatttcgatttcatacttacaatcatatggcaggattagtcattatgatttccaattgatatatgccaaaagtgaatcagttaacatgttttggtttttaatcgttgtccaaggaattgtattaccaatcctacaagaatttttggcgactggctttttgttcaattatgcttttcggcgaaatactaagcaagttgcaattatggggatcattgtttcaggtctgatttatagcttactgaactttcaaaattcagtagtactctttattattgatgcaatttatggcatggtgtttgcttggagctatatgtacacacaaacattattgatgccaatttacttagctgtagttagtggcgtacttacagtgattatgatttaaaaacaaaaggatgagaaaaattctcatcctttttttatacaaaaagcggatagcgtgaatcgaacccgcatctacagcttgggaagctgtcgttctaccatttaactatacccgcaatatgtttttattttagcattttttctatttgaagatcaacacttttacgatcaattaagctggtaaaattttgaaaaagccagcggcgtagttcgttgggcataacaactagaggcattctattatggattggcgccatatctttgttaggcgcggtagtaaccattgaaaaataatcctgatcataaatacctgcaattaaggtaagtggttgattagtgcggaaggcgtagcgatcatggtatttacgaccgttttcagcaatatgggtagttttagcgtattcaaagaatttttcggttaagattaagcaacgttgcttggcaaaggatttgtcccacattgaaggcgctgaatcataaaatcgctcaattctagcgttaaataatggcttttttggatcaacgggacttggatagccccattttttgttgtttaattgcaattgaccattttgataaagcaaaacaggtgctacttggttaggaaaaatatcttgtgcttgaatgtcaaaatttggtgtaactaagggcaggtcaagatcgcttttgagatattgttgaatttgttttaaattaggtaaacgaaactggttgcacatacgcatttcctttctttagggctagtttaatcatagcctattttttgttaaaattaggtaattaaacaattaatattaataaaaaaataaacttaaaaattagaaaagagcaaaaagatggcgaaagaaattttattaactggtgaccgtcctactggtaagctgcacattggtcactatatcggttcattaaagaatagagtaaaattacaaaattcaggtaaatatgatccatatattatgattgcggatacacaggctttgaccgacaatgctcgtaatccggaaaaaattcgcaatagtttgatccaagtagctttagattacttagctgttggtattgatccagctaaatcaactatttatgttcaatcacaaattcctgctctatttgaattgactgcttactacatggatttagtaactgtggctcggcttgaaagaaatccaactgttaagacagaaattaagcaaaaagatttcaaagactctattccaattggctttttaaactatccagtttctcaagctgctgatatcaccgcttttaaagcaaccgttattcctgttggagatgaccaggaaccaatgttggaacaaacacgtgaaatcgttaggacttttaaccgtgtttataattgtgatgttttggttgaacctaaaggttatttcccacctaaaggtcaaggacgtttgccaggacttgatggtaatgcgaagatgtcgaagtcacttggcaatgcgatttatcttgctgatgatgcaaagacagttcaaaagaaagttatgtcaatgtacacggatcctaaccatattcacgttgaagaccctggtaaggttgaaggtaacactgtctttacatatcttgatgtcttcgatccagataaggacaaggtggcagaacttaaggcagaataccaaaagggtggcttaggtgacgttaagattaagcgttacttaaacaaggtccttgaagcagagcttgcaccaattcgtgaacgtcgcgaaaagtttgctcaagatgaagatgcggtttatgaaatgcttctggaaggttcaaaaaaggctaataaagtggctaatgcaacacttgaacaagtccgtgacgcaattggtttgaactatttcaagaatagataaggctgaggtaaagttatgcacgatcgaattccttggaaacaatattttatgatgcaggcgctagtaattgcgcaacgctctacttgtaatcgcgcattagttggtagcgtcttagtaaaaaataatcggattattggcactggttataatggttccgtttcaggacaaccgcattgtgacgatgtgggtcatcaaatggttgatggtcactgcgttagaactattcattcagaaatgaatgcgatcattcagtgtgctaagtttggtgtttctacagaaaatactgagatttatgtgacacattttccttgctataattgctgcagatccttgttgcaggcaggcgtgaaaaaaattaactattattttgactatcgcgataatccattggcgatgcaactacttcatgatagcggggtgccttatgaacagattaagattaatcgcaaatacgtggaaagcttggcccataaacttgaagaagacgagaattaatttaatttggttaatgggactagtaactgtatttttaataacgacaggatttgtccagccaaatattgaagatcatgctcatattttagataaagaaactcgcactttgattacggaaaaaaataatcgctattttcagactaaagaacaaccgcaaattgtcgttataacggttaaaaggctgaataagttaacacctaagatgctagatcattctaagcgaacggtctttattgtggtaggacagaaaggtaaaaagcgtaatgtgcaaatttattcaactaaagatttgcatagtgccttcaccgaggtcgctcggggcaatatcttgcgtgctgaagtagataaattgcgtagtcaaaataatgcaacttttaacaagggaattcgcttcgtctttcgggcatgtgcgactagagttgatcaacaatatcaatatgcacttgataaatatgatttgacgcaagcagaacaaaataaagtcgcgcgtccacatagtgtagctttaccaatcgcactggcactggcatttttaattacgggaattacttatttcttgcgtagatttagtcatcgtgatccaatttctaagaaatagtcggcttgacttatttgcattttgtccttacactttttatagacataattagcgaaaaactgttaggtgagactcctacgtgaacacacgctatcgcccagaaacatccagagatgccaacgggttaaataggtgtcgtcgacttaaggcgagatccagatagctagcatgtgcttacgtcacgtagtgttaaaactgaacgacgagtatgacagagccttgtttggcaaaagtcacctgcagagttacaggtggcttttttgttttgcttgtcccaattaaagaagggagcaaataatgttaaaagcagctagcaagaagcgatcgaatatagacattcaaaggattcaacggattgcgcgtgagtcacgtagcgagacgctggcgcgtttacaggcgagtgctgaagggctttcgactaataaggctgaagaaaacagaagagaatatggcaaaaacgaaatcattactaatagcaattcctctaaatggcgcttattatgggaatcaatcgctacgccatttacgttggttttattagtattaactttattaaccctgtttactagctatattttggtgccacaaggagataatgacttaattactacgatagtgatgatcgtgatgttgattatctcggttctcgtcaattttatccaaaaaatcagaattgctaaggtaactgatcaattactcaatatggtatcagttacaacgaatatccggcgtgatggcaaaaatgtggaattgccaacagatgaagtagtggttggtgatgtaattaacttgtcggctggtgatatgattccagcggatatgaagttgttaactagcaaagatcttttttgctcatcaagctatttagatggggatcctgagccggcagaaaagatggctaatgtagtaattaagccgagtatggctaatgattatttgaactaccctaatattctatatgagggaacaactattgtttcaggctctggcaccgggattgtttttgcaattggcaatcacactgtttttggcaaagcagttcaggctatttcccgtaaaaaagtaaaaactaccctgtttgaccgggaaatgaagcaattagctaaaatattgattatcgcgacagcaattgtgattccgcttttgtttgtgattaatggcctgactaaggggaattgggggggaaagcttaattttcgctttgacagcggcagttggcttaacaccagaagtgttgccgattattgttaattccaatttaacacggggcgcacgggaaatatcccaaaatggtgctgtcgttaagcaaatgaatgctattcaaaatttgggctcaactgatgtgttctgtatcgataaaaccgggactttgacacaaaatcaagtggttttagagcgtcactatgatttagatatgcaagaaaccccacagattttgaagttttcatatttgaatgcatattatcaaactggggtaaaagatttaatcgataaggcggtaattgatgccgcgggcgatgaactagatgtaaacgaaattcagcgtgattacaataaaattgacgaaattccctttgactacactcgaaaaagaatgagcgtggtagtggtagataacgatgaacaccacgggcagcacttattagtaactaaaggtgccgctgaagggatgctggcaatttctaataaggttgaacttaatggcaaggttgaggatttaactactgcctggcgagaaaagatcttaaatcagattaatgaattaaacgatgacggtttacgggtacttttagtaggttataaattaaatcctgccccagtaggtgagttctctgctaaagatgaacatgatttaaccattattggctatttggcttatcttgatccgccaaaagaaacaactaaagaagcgctggaagatcttaaaaaagattatgttgatgtcaagatttttactggtgataacgaagcagttactcgtgctattgctttgcaggtgggattaaacgttgatactgtttatgacggcacccagatcgaagcggttagcccggaagagttgcgtgaaattgttgaaaaatgcgatatatttgtgcgaataaccccggaattaagagtaaaaattattaatgcactcaaagcaaacggtcatacagtcggttatatggggaatggcaataaagacgctttagcaatgaaggtagctgatgtgaccgtaacttcgaatacgtcagttgatattatcaaagagtcagccgatattatttttgagcaaaaagatttgcagctgttagaagaaatgattctaatgggccgaaaagtcttttcaaatacaatgaaatatattaagaccttcttggtaactaacgctggtagtgtaattgcgatggttgtttcatcgctgctcttgccatttttgcctcttttgccattgcaagttttaattttaaatttgctgtttagcataagttgtctggttattccctttgatagtgtttctaaaaactatgtcaaaaagccacaaaaatggtcgattaagagatggccgaagtttgtacttaattttggtccgattctagcaattattgattttatcgcaatgggcttgatgttttatgtgatttgtccatatttagtagggtctaattatcatcattgggtctttatgacactattttattcggggatttttgtggaatcgctttggacaagaattatggtgattcacactttgcgtgatgaacgttttccattctttaagcaacatgccacgccagtggtgttcttggtgaccattggtatggcaattattggtacaatgttgccttcatcaagtatcgcgccaagtttgggcctagctcaattgccgtttggttattggggcatagtcttcttgctagaagtaatctacattttactgacgactttggttaagcacttatatttaaaaaaagaaaaattctgatttgaattaaaaggaattgctggttttagcccaattccttttttttgcatgttaaaataaaatagatattttagacgattaaaggagtttgattaatcaatggctgataaagatactttttatattacaaccccaatttactatccatctggtcgcttaacgatcggtaatgcttatactactattgcagctgatacaatggctcgttacaagcgcagtcaaggctacgatactttctttttaactggtactgatgaacacggcttaaagattgaacaaaaagctgaagcacaaggaattaagccacaagagttcgtcgacaagatggcggcttcttacaagaaattatggaagagtctcaatatttcttacgataagtttattagaacaactgacaaagagcacgtagctgccgtacaaaagatttttgaaaaattattagcaaaaggtgacatctacctaggcgaatatactggctggtactcagttgaagatgaagaatactttactgaatcacagcttgctgaagtttacaaagatgatgatggtaatgtaatcggcggtaaggctccaagtggtcatgaagtacgtttggttaaggaaccatcctacttcttcaagatgagcaagtatgctgaccgtttggtggaatactacaaggaacatcctgaatttattttgcctcattcacgtgaaaaggaaatgcttaataacttcattaagccaggtttggaagatttatcagttacccggactactgttaactggggaattcctgttctaagtgatcctaaacacgtggtttacgtttggatcgatgcactttcaaactatattaccgctttgggctatggttcagacgatgattcattgtttaagaaatattggcctgcagacgttcacttggtaggtaaggaaattgttcgtttccacactatttattggccaattatgttaatggctcttgatttgccacttcctaagcacattatcggccatggttgggtattgatgaaaaatggcaagatgtctaagtcaaagggaaatgccgtttatccagaatcattgactagtcgttatggtgttgatccacttcgctattacttgatgcgtgctcttccatttggcgatgacggtatttttacaccagaagactttgttgaaagaattaattatgacttggccaacgatttgggtaacttacttaacagaaccgtgtcaatgattaatcaatatcaagctggtcatgttgatgcagttcccgttgctcaagctgaatttggcaaagacttgcaagatacagctgctagtgtcattaatgattatcgcgaaaatatggattcacttcacttttcaaaggcattagacaatatttggaagttggtttctcgtgctaacaagtatattgatgaaactactccatgggctttgaacaaagaaggtaaaaaggaagaacttagcaaggtcatgagcaatttggctgaaagcttgcgtttaattgctattatgattgaaccagtaatgaccgaaactgcaccaattatgttcaagcaacttggtttaaattgggacaatgaagacgctaagcatttggcctttggtgactttgattgggatgttaaagtaattgaaaaaccacaaccaattttcccaagacttaagatggacgaagaagttaagtacatcaaggatgaaatggctaaagctaagccaaagaagaccactagaagtgaacaaaagaagggtgacgaaatcaccattgacgattttgacaaggttaagatccaagtaggccaaattttgtcagttgaaccagttaaaggctcaagcaagttgctcatgttcaagctggactttggtaatggcaaggaaacccaaattttgagtggtatccgcaagttttatccagatgcaagtgagctattagacaaaaaggttttagctgttactaacttaaagccacgtaagatgctgggtcaccttagtgaagggatgctcttatcaagtgaaaagcatggcaaaattaagttagctcttgttggtgatgaacatgcagttggggctgaactcggctaatggagatcattgataatcatactcatttgaatgacgagccgtttcgcggcaaggaacaatattatttagaacgagcaaaagcacttgatgtaaccaaggttatttgtgcggggcaagatcctgactttaatcaaagagcggttgacttagcacaaaggtttgataatgtctatgcgatggtcggttactgtcccgatgtggctaaagactatgatcaacaggctgaagataaactaattgaacaattgaagcagcctaaggtagttgcaatgggcgaaatcgggctagattattattgggatgaatcgccgcgcgacgtacagcgtaatgtttttgcgcggcaaattgaagtagcacatgacttgaagatgccagttgatatccatactagggatgcatttggagattgttataacatcttgaaaaatagcaatctggaatatggtgctgttttgcatagttttaacggtggtgttgactggttaaataagtttttggatttgaatgtttacttttcatattcaggtgttgtttctttcactaaggctacggaagtacacgagagtgcaaaagctgcgccacttgaccgaattttagttgaaaccgacgcgccatatttaacgcctaagccatatcgtggtcatcaaaatgaaactggctacgtacgttatgtggcagaagcaattgctaagttgaaggatattccactagagaaagtggcggatgctacttataagaacacagtgagagtttatgggcttaaataaaaagaattttgatgcggtaatcgttgttgaggggaaagacgataccatccgtttaaaacaatttttcccaggaatcgagacaattgagactaatggatcagccgtttcagatgaagtattgaagcaaatccaaaaattaagtgagagtcggcaaattattgtctttactgatcctgactttaatggcgaaagaatccggcgcattgtaactaaagctgttcctgatgcaaagcaagcttttattacccgtaaggaaggcgaacctcataaaaaggggagtctaggtgtagaacatgcttcaaaagaagcacttgagcatgcactaagtgatttgcatgaggttgaaccgcaaaaaagtgatttaactccagcaatttatcggcaattaggtttagctggtggtagcggctcacgaaaattacgtgaacaagtaggcattaaattacgagttggctatggcaattccaagcagttttataatcgcttgcatacttttggcgtttcattagctgaattaaaggcagctgtcaaggaggtagaaaatgacaaataatattccaattggctctccagttagaacacaagcaattgttaaccgttactttgtcaaagctaaaaagaacttagggcaaaatttcttagttgatcagactgctattttaggtattgttgaagctgctgggataaaaaaagatgatcaagtcattgaaattggaccaggtattggctctttgactgagcaactactgttggcaggtgctaaagtttttgcttatgaagttgatgatagcttacctacgattttacagaatgaactgcctaagaaaattgatgatcagcctttggctagtcgctttaagctgatcttgaaagatctattaaaagcggactttaaggtagatattagtgacttctttgattttactaagccaattaaagttgtagctaacttgccgtattacatcactacgccaatcatttttgccttagctgaatcagatttgcactttacttcattgaccttaatgatgcaaaaagaagtagcagaacgattagaagcccaaccaggcagcaaggaatacggtccgttgactatttccgttcagaccgaaatgaatgttaaacttgctttgcaggtgagtcataattcctttatgccgcgaccaaaagtagactcgagcgtagttgtcttaacgccactgaaggaaaagccagcaattgaaaatcgtaagcattttatttgggtagtgaaaatgtgtttttcacaaagaagaaagacactcaataataatttaaaagctttgttgcctgataaaactaagcgtgatgaattatttgcggaattaggggtaaatccaagaattcgccctgaagaattaacaattaaacaatttattaaaattgctagctttattcctgcaagatgatgtataatattgaatttattatatatttgtgataaaatgttgctaaaggagctgttgtttagtgccaacatcaattatcacaattaaacataagttggattctcacttaggtgatactttaacagtagtagctcaagcgggtcgtaagaaagttactaagagacggggaattctaagagagactttccctgcagtgtttgtggttgatttagaccaacatcaaaataattttaaacatgtttcttacagttataccgatttactaactaagaatattgcattagagtttgatgatgaagctgaagaggctgaagcttaaacacaatttttgaaattgtcactagcatttatttaaaatgttagtgcttttttttgccctttagagtatattaattaagtataaaccaaacattagaaaggagatttcatgaaacgttcagaaagattggtggacatgaccaaatatttaatggagcgtccccatactttaattgcactaccattctttgctaagcgttacggcgctgctaagtcatctatttcagaagatttagctattttgaagcacactcttgccagcaatcaagatggtattttggagactgtagccggtgcagctggtggcgtgcgctatattccatttttaggtaaaaaacacgcggaagcatatttgtcagatttatcaactaggattgaggatccaagtagaattttagccggtggttttgtgtatctgtcagatattttaggcaatacgcaagatttacgtaaaattggtgaattagtagctactcattatgcttatgaagaaatcgatgctgtcatgacagttgaaacaaaagggattgctttagccaaagcagttgctcgttttttagatgtaccatttgttacagctagaaagcgatcaaaggtaacagaaggtgctactatttctgttaactatatttcttcatcgttgtctcgagtatcgaagatggaattaccgactcgtgctcttaaaaaagaagctaaagttttaattgtcgatgattttatgaagggtggcggtaccctaaccggaatggaagaattagttaaggaattcgatggtactattgccggcgtttgtgtactctgtgaagccgattttgacaaagaaaagctgattaagaactatctttcattagtaaaaattagtgaaattgatactgcccaaaagctgattgtagcagaacctggtaacttcttaactgaaactgattttgaccgtttctaaaatggtatactagaatcaagttttgattattaagaggttaatattaatggaaaaatatgtagttgttcttgccgcaggtaagggcacacgaatgaagtcaaagttgtacaaggttttacacaaagtttgtggtaaaaccatggttgagcatgttgttgatgcagctcaaggcgttaatcctgcagaaatcgttacaatcgttggtacaggtgctggcgatgtagaaaaagtactggcagacaagtctaagtttgctttccaagaaaagcaattaggtactggtgacgccgtaatgactgcgcgtgaagaattgggtgacaaagatggtgctactttagtagttactggtgatacaccacttttcacaactgatacatttaatgaactattcaagtatcatgcagaaaaaggcaatgctgcaactgtattgaccgcggaagctccaaatccatttggctatggtcgaattattcgtgatgatcaaggcaatgttttacgaattgtagaacaaaaagatggtaaaccagaagaattaaaagtaaaagaaatcaatactggtgtattttgctttgacaataaaaaattatttgaagcattgaagcacgttaataatgacaatgctcaaggtgaatattacttaactgatgttttagaaatcttgcgcaatagtggtgaacgcgttggtgcttacaagatgcctgactttagtgaaagccttggcgttaatgaccgtattgcattagctcaagctactaagactatgcaaagaagaattaatgaacagcatatgcgtgatggtgtttcatttatcgaccctgatactgcttatattgatgcagatgttaagattggcaacgacactgtaattgaaggtaatgttgtgattaaaggaaacaccgaaattggtagtgattgctacattactagtggttcaagaatcgttgattctaagattggtaataatgtcactgttacttcttcaactgttgaagaagctgaaatggacgataatactgacatcggtcctaattcacaccttcgtcctaaggcaattattcgcaaaggtgcacatattggtaactttgtggaaattaagaaggctgagattggtgaaaatactaaagtaggtcacttgacttatgttggagacgctaccttaggtaaagacattaacattggctgtggtacgatcttctctaattacgatggtgtaaagaagttccatactaatgttggtgatcatgcctttattggtgctggctcaacattgattgctccaattaatgttgcagatcacgcctttattgcagctgataccactgttactaaggacgttaataaatatgacatggcaattggccgtggccgtcaagttaataagccagattattggcataagcttcctctttctcaagataaagaatgggattaagaataaggcactagtgtatcaagctagtgcttttttgttaagaattgctaaatacttattgcaaaataataattgagacctacaataaggtgtactaataataatttttacatgaggtaggtaatacaatgaaattaagtcataagttagttatggtttcagcagctgttttgatgggtgttagcccagtattaggtatggcagaaaatactgtatctgttcaagctgctactaagagtactaatggcgtacataatacttacggtaaaaacagcaaagtcaaagtaactaagactatgaagtttgtcgaccgtaatggtaagaaaacttctaagactgctcctaagggtggtagctacactatttggaacgtcaagaatatcgacggtcaagtttactacagtattcaaactgatttgaagtactggattcctgcaactgcaactgaaggtacagtaacttataagtcaggcaatactacttatactttaaagagtgatggcaagaaggtaacaacttctacttcaactaagaaggctgttaagaagactaattcaaataaaaacactaaaaaagtagttaaagaatcaactaagaaaactgccactaagactactaaaaaaagcaactcagaaaagactactaagaaaacttcatcaaagaagacgccagtggctaaggcagttaagataactactaagaataaggcttacgtttacgacaagaatggtaagcgtgtaaaaaactatttaggcactagttacattggtaaaaagatcactgttaaaggtttaggtactaagaccattaatggtgttaaatattatgctttgcaaccaaatcattattacattaaagcttcagatgtaactgttaagtaataattgataggaaaaagacactttttcatttctaaattggcaaaaaaatattttagatctacaatatataaatgaactttaagtttagtaagaatgaggtatttatcgatgaaattaagtcataaattagttatggtctcagcagctgcattgatgagtgttgctccacttttgggtactgcagaaaacgtcaacactgttcaagctgctcctaagaagactacttcaaagaaggcagcaagcaacaagatcactttggtacgtgtgtacgataagaatggtaagcgtcttgataagtacatgggcagtgcaaaatacactactattgctaaaggcataactgttacttcaactggcactaagactatcaatggtgtaaagtactacgatcttggtggtggtgcttatatcaaggctgttaacgtagatggtaaagctgcgtcatcaacttcatcactgtcaaagggtactaaggctaagtttgtttctaactcatacatttatgacaagaacggtaaacgtatcagcaagtaccaaggcaaatctaagtttgttaagggtgattcagtcactacttacggtattcaaaccattaacggtaagaagtattaccaacttgacaagaagggtactgcttttgtacgaactgttaacattgatggtaaaaccacttcaaaccaagaatcatctgtttcaaatgatgcagaatcaactaaaaaatatgactactcattaaagaagaatgcttatatttatgataagaatggtaagcgcatcaacaagtaccaaggcaagtctaagcttttaaagggtgccgcaattgatgtttatggcattgaaaccattaagggtaaggattactaccaacttgacaagaaaggcactgcttttgttaaggcaagtaatgtaactagaaccgttaaggcaacttcaattaccatgaagaagaatgcttatatctacaatggtaacggtgacaccaagaagaagacagttaagaagggtaagactgttaaagctactgaagcaagatacattggtactaagctttactacaagattggtgataatcaattcgttaaggctgctaatgtaggtaaaatttcaggcccagaactagaaccagttaacgaaccagatggtgctgctactgttgatactggtgataatactgtagatccaaacgtaaccaaggtaactacgattaatgttgctccactttacaacattaagggacaaccagataacgttagagcatttggcgaaggtcaaagtcaacaagtttcagaattgagatatattgcaacttctgcaactgctaccccagaattattctataaattatcaagcggtagaggctatttaaagcagtcagacgttgctgtaagtggtaagattttaactcctgttaacactccagaacaagctagagcagacgttacagttgctacagcagctgataagactaagttgcttcaagacattaacgaagcaactagtgttaagaactcagaagcttacaagtttgcttcaagtgatgccaaggctgcatatgatagggcaattacaaatggtactgctgttaacaacgatgctacagctactattgctcaagttaacgaagcagatgctgcaattgttagcgctaaggctaaacttaacggtaagaaaatcactgtatcaagcattagtaatttgactccagcagaagtaacttcaattgtacaattggttgcaactgctaataatgtaccagaaagttcaattcaactttcaaatagtggtgctttgacaattgttactaatggttatactcaagttttaaaccttagtgattatgttactcaaacttcagcaacttcaactaactagaaatgcataaaataagacgtagtatctgaaaggacactacgtcttattttttaggatattttcgttgtactagaaagtacaaatatattctaacttttttagcgattaatagttagtgcttttttatggttgcggcaaaattcttgctataattaaggagaatgtggttctttttagagcaacttttgctaaaatagagctggttaaatatttttacggaggaaattatgtcctataaagacgatatgatgatcttcgcccttaactcaaatgtaccattagcacaaaagattgcggatcgtgtgggtgttccactttccaagtctagtgttgaacgtttcagtgatggcgaaattcaaattaatattgatgaaactgtgcgtggtaaagatgtctaccttgtacaatcaaccagtaagccagttaatgacaatttaatggaattgttgattatgattgacgctgtacgtcgtgcaagtgctcgtacaattaacattgttatgccttactacggttatgctcgtcaagatcgtaagactcgtgctcgtgaaccaattactgctaaattggttgcagacatgcttcaagctgcaggtgctgatcgcattctttcacttgacttacatgcaccacaaattcaaggtttctttgatattccagttgataacttaatgggtgctccacttttggcagactacttcttgcgtaacggcttagagaaagacgctgttgtagtttcaccagaccacggtggtgttactcgtgctagaaagcttgctgaattcttaggttgcccaattgccatcgttgataagcgtcgtcccaaggctaatgttgctgaagttatgaacattatcggtaacgttaagggtaagcgtgctatcatcattgatgacatgattgatactgctggtactattactttagctgctcaagccttaattgatgcaggtgctactgaagtttatgctagtgcaactcatgctgttctatctggtccagctattaagagattgaacgattcaccaatcaagaatttggttttgactgattcaatcaatcaaccagcagagaagaagcttgacaagatgcttttggtatcagttggtccattgatgggcgatgctattaagtgtatccaaaaccatgaagcacttagcccattgttcaacaccagatacgaagctgacaagaacaagtaagataaaatttgataataaaaaatggctagccgatgaggttagtcattttatttttttttgaaaaaatcatcaccatttataataaataagagtgtattaaaatacacatgagaaacatctataattagagatagatgtttttcatttaaagaggacaaaattatgacacaatatttatcattcgatattggcgggactaacttgaaatatgcattaattgatcaagaagggcatattcttgaaaaagaccgggtaaagactaatactgaaaacctagatgcattcatgcagacgatgtatgaagtcgctgacaagtatcaaggaaagttcgctggcattgcagtctgtgctcctggtaagattgatactaagaataaaattatctattttggtggagccttgccattcttagatggcttgaatttagaagagactttaggtaaaaaatatgatgtaccagttggcgtagaaaatgatggtaaagcagctgctttgtcagagcaatggctaggcgaattgcatgacgtcaatactggtatcgcaattaccttaggcactgctgttggcggcggtgtcatagttgataatcgtattttacatggctggacttttcaagctggcgaattgagttggatgattacgaattcaagtattggtactaggaatatggctgcttatgctggctttagttgttctgcggttaatatgatcaaaaaagttaacctggctttggggaatatcgatcttgataacggcttgaccgcgtttgaggcaattaacaatggcgatttaagagcactagccgtttttaaacgctattgccgcaatgtagcaatcatgatcctcaatattcaggcagtaatcaatggctctaaagtaattattggtggcgggattagtgcacagccaattttgattgaagaaattaacaatcaatttgataaaattttgcagaataatccaatgttgaataatcaagtgattaagccggtgattgtggctgctaagcatggcaatgattctaacttatatggtgcactttatgcattactgttggaattaaatgacgaagaagttaggtaaatattgcaacacaaaaaggggatgcgtcgcatcccttttttacatgagctaaataataatttaatctttgccagaaacaatcttggcaatcgcaatgctggcaccagcaacgcaagctaccatggcggttttacaaccaatcttgactacgtcttttaccaaatccttattttcatgaatgaagtcaaaagacattttagtatagtccatgcaataaccatgaactgtgtccatcaagtctttaacttgagtatagccgctcttaggttctgcctttacttcatcttctggattaatttgagttcttacatctgtatttaaatcatttctgttcatcataaatacctcgattctaggatttaccttaattttacttcttttgctcacgttttggtcttctcaaatatcttaaggcaccattcttaatatatttttgaaattgctcataaagtggatcgaaaatttgcggctgatcttcatcgtgactgagcatagttttagggaagaagaagcgttcatctccttggaaagtaccatttaatgcgcgaaccaatgggctgagttgggataactcaatcatgctgccgtcgtcttgcataatttcaatttgactattagcatttttccccgttggcttataagcatcatatggttcatcgaatgcggaattggtagcggtatagtaatcaggattaaagccagcttgcttgattaggctcttgagcttaggtaaaagatttttggtttcttcatcgattcggacactagctagcggttttctgtacaagtaacgcttggctaggtcagataagattggatcttgtgcctgggtccacatagaaaaattagtttccattactccatcatcaagctttaaataatcgtctaaagtccaattgccttcaaggaatttagtcaagctaggtgtaacttgcagatttccctttttataaacagtttgagcgcgctctaaaaggtgatgcaagatgacttccattgagcgtcctacgcggtggaagtagacctgttggtacatctgatagcgtgacacgatatagtcttcaacggcatgcatcccattgttggcaaaacaaataccattttgataaggacggattacccgtaaaattcttgataaatcgaacctaccatagttaactccggtgaaataagcatcccgctgcaaataatccatccggtcagcgtcagcttgacttgagatcattttaaccacttgcggattaggataagtcttagcgattacgctggcgactaattcaggaaagttaggtgcaacttgttttaatgcatggttaatttctgtattaggatcagtaatgatcttttgtccaattttttcatgattggtgccaaaaaggtgctcgaatgtgtgcgaatagggcccgtgaccgatgtcatgaagcaatccggcacattctaccagtaatcgattatcatcgttccagagaccgtctcctggcgtaattgagggatattttttgctaaagatatcgcaaattcttctcgttaattcataaacgcctaagttgtgctcaaatctagtgtgagttgcacctggaaaaacatagctaacaggacctaactgtttaatgcgacgcatgcgttgaaattctttagacttcagtatgtccaaaacaactttatcttcaatatgaatatagccgtgaaccggatcacggagaacaacctcttgttttaatttttcgctttgaaatcttgtcataaaaatccaccaagtttaatttattaattttttgaactatatataataaaatagattatatctaactaaaattatatcagagatatagtaataatgtttaaagggggcgcttgtttgacagcaattacgattgatttgactagtaaaattactcaagacgatgagacagagacttttacgcgacatgcgcaagggcaattgactgaagaaggcgacgtcacacgaatttcttatgccgaagaagggcaaattccagtgaagatgcttctaaaggagaatgaattgttgattcgccgcggcgttgacagcaataattattctttaatgaaatttattccgggtgaaaaaggcaactgccgctatgtagttgaagggcgccgcatggacatgaccagcgtgactaacttgcttgaatatcagagtcaagatgatggttcacgtaaacttcgggttgaatatgacctctttaatggactatacttaataggtaactatgcagtcacgttgatttttacttaaaggcctagtagaatagtaaagattgtataagagaggacgtacagctgtgggattagacaaatttaaagacaaaaatcgcgatgaattgtcaatgatcgaagttgctcgtgcaattttggaagacaatggcaagagaatggcatttgccgatattgttaatgccgtacaaaaatacttgaataagagtgacgaagaaattcgtgaacgtttaccacaattttatactaatatgaacactgatggtgaatttatctcaatgggtgaaaatgtttgggcacttcgttcatggttcccatatgaatcagttgatgaagaagttaatcaccctgaggatgaagaagacgattcacgtaagcaccacaagaaggttaatgccttcttagctagcgctactggtgatgatgacattatcgactacgataacgatgatccagaagatgacgacttagacgccacagacgatgatactgatgatgtattgccagatggcattgaaggtcaattgtcacaattaaatgatgatgatgatgatgacgaagaagataattaatttgcttgacttaagaagaaaaagcagataatatttttgttgggcaccctatgtgcgtttagctccccgttagtgggagcttttttgtttaaaggataagttaaaaggagcagaacatgacaaaatacatcttcgtaactggcggtgtcgtatcttcacttggtaaagggattactgcatcaagtttaggtcgacttcttaagaatcgtggcttgaaggtcactatgcaaaagtttgacccatatattaatattgacccaggtacaatgaatccataccaacacggtgaagtttatgttaccgacgatggtacagaagctgaccttgacttaggtcactatgaaagaatcgtagatgttagaactagcaagtattctaacgtaactactggtaagatttaccaagaagttttggaaaaagaacgtcgtggtgactaccatggtgctactgtacaagtaattcctcatattactgacatgatcaaaaagaagatcatgcgtgcagctttgactactgattcagatgtaattatttctgaaattggtggtactgttggtgatatcgaatcaactccattcatggaagctattcgtcaaatgcgccgtgaagttggtccagaaaatgtaatgtacattcactgtactttggttccacttcttcacgctgctcatgaaatgaagactaagccaacacaacactcagttgcggaattgcgtagtattggtattcaaccaaatatgctggtacttcgtgctgaacaaccaattgaccaagaacacaaagacaagatttctacttttacagacgtgcctgttgatcgaattattgaatcaattgatgctccttcattattcgatgtgcctttgaacttccaaaagcaaggcatggatcaaaaagtctgtgatttcttacacttagagagtccaaagccagaagctgacatggaagcttggaagaagcttgatgaacgtgctaagaccttgaagcatcacactaagattaccttggttggtaagtatgtagagcttgaagacgcttatatttcagttactgatgctttgcaacatgctggttatctttacaacactaagattgatgttgataaggtacaagctgaagacgtaactgaagataatattgcagaaatcatgaaggattcagatggtttgattgtccctggtggttttggtactcgtggtcttgaaggaatgattactgcaattaagtatgctcgtgaacatgacatcccattcttaggtatttgtttggggatgcagatggctagtgttgaatttgcacgcgatgtattaaaccttgaggatgctaattctgcagaagcagagccaaactgcaagaataatattatcgacattatggctgataagcgtgatgaagaaaatattggtggtactttgcggttaggtatttacccagctactcttaagaagggaactaagactcgtgcggcttacgatgatcaagatgttattcaagaacgtcaccgtcaccgttttgaattcaataatgaataccgtgaagcctttgaaaaggctggtatggtcttctcaggcgtttcaccagataaccgcttagttgaaattatcgaattaccaaagaaaaaattctttattgcagcacaatatcacccagaatttttgagtcgtccacaacgtccagaaggcttatttaagtcatttattggcgctgctagtggtcttccagcacaagaattttaaagtgattaaagtttgattatacaaaatcttaagaaaacaagaactgagagacctcagctcttgttttttttgtaaatatcctttaacattattatgattaattgaaagtagaaaaggatttgttttcgccaatgaagcagatgataattcatggtggaaagcccctgcagggtgatgtttggatcggtggagctaagaactcaacagttgctcttattccggcatcaattttatcaagaacaccagtgaccttggaaggcgtcccaagaatagctgatgtagttaacttgatggacttattgagtgagatggatgtacattgtgatttcggtgaaaccactttaagaatagatccaactgatatcaagatgagtccgttgccagctggtaagattaagagtttgcgcgcttcatattactttatgggtgcgctacttggtcgctttggcaaggcagtagtgggcttccctggtggtgacgatattgggccacgtccgattgaccaacatattaagggctttgaagccttaggcgctagcgtaaaaaatgaaaatgatcaaattataattactgcaccagaagatggtttgcatggagcaaaaatccatttaaagatgccatcagttggggcaacgatgaatattattatggctagtgtgacggcacagggccagactataatcgaaaatgccgcaaaagaaccggaaattattgatttagctaccttcttgaacaatatgggggcagttattcgtggtgctggtactgactctattcgaattgaaggggtggagcagcttaaagcacagattcctcatacgattattccagacagaattgaagcagggacttatgttgctttagctgcctgtattggtaatggcattcgcattcataatattatcgaagaacaccttgattcatacctggctaaagttgaagaaatgggtgtagtaatcgattcagatgaagattctttgtatgtttacccagcgggcgacctaaaaatggtccaggtgaagacagatgtttatcctggttttgcgacagatttacagcaaccaattacaccacttttattaactgctaaaagcggtgaaggtgtagtaatcgataatatttatcctaaacggattggtcatattgctcagttgcaaaagatgggagccaatattaaagttgaagataatattattttggcccatccaactaagcagtttcatggtgcggaagtaactgcaggtgagattcgagcaggtgcctgtctgatgattgcaggcctgatggctgatggtacaacaacgatcgacaaggctggtaatatcttgcgtggttatgatcgggtccaagaaaagctgcgtcaacttggagctgatgtaactatcaaggatgatcctgctgtaccgggtattttagataatatttagtaaataaaaaccacatggaaaatctccgtgtggtttttgtaatgatatgtcgatttgtaggtgaacaaatgagtttaatttttacaagacgtgcacaaaattcagatgtggataaaattgtgcaaattttaaatgatgcgacttcttttttaaaggaaagtggctcatcgcagtggcaaagtggctaccctaatcgagcaactgtagaagatgatattaaaaatgggtgtgcttgggtattaactgtggataatgaagttgcaggttatgcggcagtggtaattggccgtgagccaacttatgcggatattgaaggcaagtgggaaaataatgtggacacctatgcgacaattcaccgcattgcagtttctagtaagtttagaggaatgcatttgagtcaatttttcttgagcaatattatttctctaacttatgcacaaggaattcacaattttagaattgatacaagccggaaaaataaaattgtccagcacattgcagttagtcataattttattgaacgagggattattcaagtaactgaagatccggttgattcaagtagaatagcttacgagttgaatttaaggtaatgaaaaaccacatgggatgtgaattccatgtggattatttttttgctttatttattaatcaagcaagtcgtatttcaaagtcattaaaccatgaccttcgtcaaccatttgaccaagcagttcaacagtgttgttataaactgtatcagacatcttttgattagcagcaattaacttgtcttgtaattccttacctgaaaggttctttgcttctttgtcagtatcatgttggatcttgtgacattgtgctaaactcttttgttcaaaggcgtcttcaagttcaccgtaaacacggtagttggtatcgcctaattgagcagttaacttgttaagccagaaaatcttgctcaagttaaacttaggagtggtttgccaagcttcaggggtagtagtgatattagtatagaatggcaccattgagttaaaggtgttaggaccaaaggctaaccattgtacacctgcaatttctgcaggaacatcattacgaatttgcaaaatatgggtttcaaagtttctgttaataccgataggacggaaggtcttcttttgttcaggagtaccttgatcgccataagcatcgtaaggagtgtcttggtagtgtgagctttcggcccatttaatatcttcaattgagattaaacgattagcatggcagataaaaggttgatcttgatctgctggagtaccaccaaagtctggatcgaaatagttgtgaatataccaagcacgaggattattgtagtgagcatccttaatagttgaagaaccaaagatgtggcgcatgttgtagccttcacggtctggattcaagtgatattcttcgattaaatcctttaggtctgctgaacaagcaaaattatcagaatcgttgaagtcgaaagtatcaatattcaaacggtttggtgcaataacatatgcatcatctgggatacggcgtgcaatccaatgatgaccaccgatagtttcaaggtaccaaatgttatccttatcagaaaaggccataccgttcatttcataagtaccgtatttttcaactaaatagccgacacgtttaacaccgtcaaaagctgagtgcaagtatggtaaagtcaaagtgacgaaatcttcttcaccaagaccaccttcacttggatcaagtaatgggtcaacaccttggatgcgtgaattagtagtgatggtttcagtagcggtcatggctacattttcagcgttaattccagctgcgccccaaataccatttttgcctgaaacatcaggtgctgaagtatagcgtaatggtgtttctgctaaatcagcgtcgtcaatcttttgtttagaaattacactagtgtagtgcttaggttggtcagctgggttaacagctttaaagccttcagggatgatgacgcggccaccgtcttcactacgagcgatcatcgtagagccatcaatagttgcttttttaccaactaaaatagtagtacattctgtttgtttcattggatcagtcctttactttatatttatgtttaaattatttcctaataatattgtatgcaaaaataatccgataagccaaagaatataattaatttccccgaaaggcatttggactaacaccgctatagcgtttaaatgccttggagaaggtaaattcatcgccgtagccgacttttttggcaatttgctttagattgtgtgtggtattagttaattctttcttagcggcttccatgcgcaattgcatgaggtacttttgcggcgataatttagtgttttttctgaacaaagcatataaaaagctgcgtgatactcctagcctatgacagagttcgacaatattgcaggtaggatcggtataattttgcttgagatagttaatggcaatttgatactgatcatttttcgatgttttgcggactggtggatggttaggaaagtcttttactagatgataaaaaagttgataagttaaagctgaaatttttaaattgtttaataaggtctttttcttcgccaaacattgataaaggtcatctagggtttgataaaaggcagttttttgaatttgacgcaagaaatttttattaggtaaatttgatgccttgatgctttcattaacgccgttgccagctaggccaatccagaagtattcccagggttcattgtggtcagcttgaaaggaacaagtttgactgcgtggaacgtaaaaaagatcgccagcttttaatttaactgcgtggtgtctactagaagtaaaggtaccagttccgctaataatgtaataaaaaatatcgtttttacgaagattgtcaccttgaaagaattcatcgggctgacatttttgtcgaccataaaacatgatgtagctatcaagattttggttatttaagttaggcatagacttcctcactgttgaaaaattatgttacttctattatagaagagattttgcttaaaaggtgaagaatgaaaaacgaccacattaagcggtcgttcgtgaatatttatagaaaattatgatatgtggaattataaaatgaaaaggtattttacttattggcaccacttcttccattgaataaaagattgagcagagttgcacagatgctggctacgacgataccgttgcctaagaacaattgaatggtttgggggagagtttggaagatttgaggatagacagtaacgcccaatcccatcccgattgaaatggcgacaattaaaatgttgcgattattttcaaaatcaactttagttaacattttgattccttgaacggcaatcatggtaaacatgactaacatagcgccgcctaagactgaatcagggatgatagtaactagagcaccgattttaggaagtaagcccatggccattaataagccagcagcccaatagatagggcgcttggttttaataccggataattgaagtaagccgacattttgagaaaaagtagtgtaagggaaggtgttgaaaagcccaccgaagatttgtgctaatccttctgcacgataaccttttttgaggtcttcttcggtgatatcttgatgaagtaggtcgccaatggcaaagaagacgccagtggattcgaccaaggaaactaaggcaatgatgatcatggtcaaacaagatgaccattcgaattcaggaacgccgaagtagaaaaattgaggtaagtggaaccaagaggcttgtgttacgggtgtaagtgaaactaatcccatgcaaccagcaatgatagtcccagcaattaatccaattaaaacagagatggagcggagaaatcccttagcccagacttcaatgacaacgatgatgaggatggtgataaaggcagcaataagattttttgcatcaccaaagtccttggcttgggcatttccgccacccatgttttgaaaggccacgggaatcaaagttagtccaattactgtaattaaggtcccagtaactactggcgggaagagttttttgatttttgaaaaccatccggcaattaagaaaacaaagattccagcaacgataatggcaccatacatggtgttaattgaaaatttttgcccgatcatttctaagggagctaccgcttgaattgcacagcccaaaacgactggcaagccaatgccgaaatatttattacggaatagttgaattaaagtggctaaaccacacatgaagatatcaatcgaaactaggtaagtcatctgtgtgctattgaagtgtagtgccgtaccaattaaaaggggaacagcaactgcaccggagtacattgccagcaaatgctgcaaacctaggacagcagcttttttgtgactaacttctttttgtgccatttttaattattcttctccctcgaagtgtacttgatcattttcaaagctatcgatttttgctagggcttcaaaacgtagaccttctttttctacccattcgcttccgccttggaaggtttttgcaacaacagcaccaactccaacaatgtcgcagccggcttgtttagcaatgttaaccatgcctttgactgcttcaccgtgggcaacgaagtcatcgatgattaagatatgttcgcctgggtgcaaaaatttctcttcaacgcagatcttattgttgaccttcttggtgtaagaaaagacgtcagcccaataaactgcatcattcaaagtagacggctttttctttctggcaaagatcattggcacgtgcagttggtaggctgccatgacaccaggagcaatcccggacgcttcacaagttaagaccttatcgactttttcatctttaaaaaggcgggcaaattcttcaccaacatgcatcattagttgcggatcaacttggtgattcaaaaatgaattaattttaagcacatttccaggtaaaacttcaccatcttgtttaattcgatctactaattccttcaatattattctcctcaagaaagaaataaggacttcttctacctaaaacaggtaaaagaagtccttaagattattcttaactttcattcacctatagtccggtatttacggtaccgggtagagactgtcgaccttatttcgacgatatatagatatttgtgttggcttaatcttaacagaatatattgccgaacacaagtggaaaattaaggattaatgttcgattatagtaaaaattattcagctgcgatatcgttatggcacagactgatgatcttttcgataatgccatataagatccccgcgattggccagatgatccagctgcgttcccaatcattggtaatgaagctatatcctagataaagtaagactgctattaaccaatagagtgtggcgtatttgttcataatcttgcgacagccggttaattggattgttaaattgcccaggtcaagcataatagctagggcagtagaaaagcaaaggatggctggactgcgaataattaaactaatggctaaagcgcgaaggctggcacttttttgagcagctgttaagtagccttgctcttgttgatcagataaaattggcaattcttcagttaagttattatctttgtggtttaattcaaaagaaggtgagccgcttttgagtaaataatcggtggtcactccaaataattctgataaagctacaattttttcaatatcgggaattgattgttcactttcccatttggatacagcttgccgactgacattcatcttttcagctagtgcttcttgaaaaagatgatttttcttgtgtaatgccgcaattttttgacctaatctcatgattgatcgtcctttcgttttgaaataatttgatttaacgaaaatttgcggttgcagaccaccactttttaattgcatttagcgcaactagtagttgcaactgctggttgctcaagataaaagccgaacaatgaatggctatttttaactttttgattgacctttttaatttttcctagtagagttagttaaaaatgcgtaattgaaaagagggagtaaatagtggctaagaatctagacgattttgataaaattattgtgcttgacttcggtagtcaatataaccaattaattacccgccgtattcgtgacttcggcatctattctgaacttttaccacacgatctttccatggagaagattaaacagatcaatcctaagggaatcattttctcaggtggtcctaacagtgtttacgataatggtgcattaaaggttgatcctgcaatctttaagttggatattccaattttgggtatttgttacgggatgcaattaatgtctcatgacttaggcggtaaagttgaacaagctgaaaacaaggaatatggccgcgccaacattacggttgaagatccagacagtattttgttcaatggcttgccttcaaagcaatacgtttggatgagtcacggtgatttggtaactcaagctccaaagggcttcgaagtaactgcctcaagcaaaaactgtccaattgctgcaattgctaatccagataaaaagttttatggcattcaattccacgcagaagtgcgcaattcagaatacggtttagacatcttgaagcactttgcttttgaggtttgtggtgctgaggctaactggaccatgaacgacttcatcgacatgaaggttgatgatattcgtaaggaagttggcgacaagaaagttatcttaggtctttcgggtggtgtagattctagcgttactgctactcttttacacaaagcaatcggcgatcaattaactgcaatttttgttgatcacggaatgctgcgtaaagacgaaggcaatcaagtaatgcaagccttgaacaaggatcttggtgttaacatcattcgggttaatgcccaaaagagattcttagacaagttgaaaggtgtaactgatcctgaaaagaagcgtaagattatcggtaaggaattcatcgaggtctttaacgaagaagctaagaagttaaaggatgtagatttcttagctcaaggtacgctttatactgatgttatcgagtcaggtaccaacactgcccaaacgattaagtcccatcacaacgttggtggtcttcctaaggacatgcatttcaagctgattgaaccactgcgtaagttgttcaaggacgaagtacgtgaacttggtgaaaagctgggcattccacatgacttagtatggcgtcagccattcccaggccctggtcttggtatccgtgttcttggtgaagtgactgaagacaagcttaagattgtgcgtgattctgatgcgattttacgagaagaaatcaagaaggcaggtttacaagaaaagatctggcaatacttcactgttcttccaggtattcgctccgttggagtaatgggcgatggacgtacttatgactatacgattggtattcgtgccgtaacctcaattgatgggatgactgcagattttgcccaaattccatgggatgtacttggtcacatttcagatagaatcgtcaatgaagtagataacgttaaccgcgtagtttacgatgtgacgagtaagccaccttcaactattgagtgggaataatttcgtaccttaataagaagaggaaatcccaatatgacggcatttgaatagggtcaatattagtggaaagtaccggttgaaagcaagttgtctaccgtttttctaccggtagaagttgattttaatcagcatgaatagtgcattaaacgctactattacctgttcgttattttggggttgtctaccgaaaattgaatattttgcttacttttgttgaaaagtaagtgactgttgtcctacttattgtcatttgataagtggggcattttttttctctttgttgccacaaaagaaatgctgaaatccaaacggagcagtctgtttgatcgttgttgttacttatgacgaaaacataagtaaatcagatatgaaatctcgaaatgaccttgaatgaaatctcaaggtactcattctcgaatgcaatatctgatcggtcgcaaccgaaggctgaaaatttattttgccgggacggcaaacatgagggggtcattgcacgatgaagccgttaaaggatgagctaattcaaagtcgacttgatgaagatgaattagcagattttgataaagtgaagaaactgctcgatgtgaagagtaattctgttgcaattcggcagatgattaaagatgaaatgagaaagccagaaatgaatggaagcaaggtaatactgacgttgtatcagcgttattaaccaagctgtctgatgaaggtcgcctaccattgtcagaggcgttgatgggtattacaggtactaaaacatcatcacaattgagtatcttacaaaatcagttcgccgatattcaatcacagttagaaagtattatgtattcagtgacaaaaatggtcgattgaacaagtggctcatgtagttagaatcgcctacaagaccatctacaactggattgagcaaggagtattggatattggcgtggctgatttacctgaccatggaattcgccgccgacgagccaaagaaacccgtgggacttttagccatggacgttccattgaagatcgtcccgctgaagttattgaccgtcatacctcaggtcactttgaagcagatacagttttatctggaaagcgtaaaggtcaagcaatagctacgtttgtcgagcgtaagagtcgtcttatcatcgttaaacggcttcagggacgagatagtacctcaataaccaaggccattttagaattagctaaccagttagaagataatctcaagccccttactgttgaccatgggaaagaattcgctaactacaagctaattgaaaagcaggccaggattcccctatactttgcgcatgcttattctccacatgaatggggcagtaatgagaatcgcaaccgagtactacgacgctttatcccaaaggtcaaccgattgagaaaatcactgatgatgagttaattcaaattaactcgtatttgaactccaggccactcaaatgcttaaactggcgcacgctaattgagatctttttgcgtaatctgcgtcactaactttgttcaagttatttcttgcaatctgccgtttgaaaagagattagccttggcggttagtctcttttactatctggtaagttgactgcaaacagaaaagagagacaagcggtcgtcaaagtcgctaaaccgtgctataatgttatcggatttaaaaataccactagttattaaatttgggaggcaagaataacgatgaagcgacttaaatttttagaaactaaacgtacaccgcgttatagtctgcgtaagtttagcgttggtgtggcttcggtattattaggagtaaccatttttggaattaactttacaggtcattctgtaaaggcagcaaccacagaaagcgttgaagattccaatagttcagcaaacagtaggttgcaacaaactaatactcagaaagaaactagtgcaacaggaaaagttcaacaaagtagtgcaagtaacgatgtaacagaaaaagttcaacaaactagtgcaagtaacaatgcaacagctaataattctacagaagctgcgacaacctcacaatctgcaccaaatacgcaaggtagcgctcacactgatattaaatcattagcagctaaatcagcagcaaaattagcagttatgaatttaatggcagcttctggtactggtactaatactggtactggtactgacagaaatgcaggagatacagtagatcaaaataacattaatgatcagccagctaaagaaaatcaaaaattggccaatgagcataatctaacttcttcagataactacagttctaatatctatcaaggtaaagataaaaattattacaaggttgtaactatttatggtaatgactacgtttaccatgctgctgatattcaagctaatggtactgctcgtgggcaatgggcaacgacagctgaagatactaaaaataatatcaatatttctaaagaagatttaggacatggtaagacccgttggactgttgttttcttccctaataagggattacaaaatgttggcggtaaagtaaatgggttagtttctgcaaaatttggtattgctctcactaatgactaccaaatcgttggtaatgttgatatggaagtaaataatgagactaatcaaaaatatatatattataaatttgaggatagtagcaatagccctactagcattacagtacaaaatccaccagctgaagtagacttttcatttaatcctaacacagatgttgattcaaatactggtttaattaatagtaaaaccttgccagcttataacaataaatatttgcaaggctcatactatttcactactgctactaatgctggtattaggaacttatggcagacttactttgaagatgctgatgaacgtaataatgcatatgatgggtcccccttatctaggtggcaatcatgactttcattttaataattttataattaaaaataaaactggagttgacggtttagaatctaaggaccttaaggaccctaaggcccaaatcccaatcatttatgacacactgggggataggaagtttaacagtgaagctaattctaagggcgtatttagcagtgataactttaaccaagcaatggaatttaagtcacaaggtgacgcaagtaacgtttttattgatcgatcacaatattcttcttatgttatttcctttactacgcaacacacagactctcatgaagtagaattattttcaggtccgaaaaatcaacaattctcaggaatctcagctaatatttattcctatcagaatggtcactataatatgttttctagattatatggtgagcagagagcactggatgcagctggtgcagtagtaaaagctaaagatatgattcctggttgggttgatgccaatattgctacggctaagattcatactgactatttaaataatgctcaaatttatgctttgcgttataaaattcaaaataacgttacagactctaatgctttaaataacattattacagaaggaaattccttaaacgatgctatgaaaaagcttggtaatagtatcggacagtatgattctgatggcagttttgctgatcataaggaagatacaacaaaggaatctgatcgctataaatacgcaaatccagataaaaaggcagcttatgacaatgcaactgaagtaactaaagctttgattaacaaagatacaggtgcctatgcagatcaagcgacggtagaaaagcttactgaagctgaaaataaggcttggaacgaacttaaagttgtcctagcaaataagatcacaccaactgttccagcaaccaaggaaccagtagcagataccagccacttaactaaagatgaacaagataaagttcagaagaatgtggaagacgctaataagggtaacttcccagaaggcactacagttacagtaggttctgacggtacagctacagtaacttacccagatcagtcaactgatacaatcaaaggtagcgatttagtacgtccaacggaagataaagataactacgatccacatggaccaaagaatccagatgacagagttccagtaaaagatcaagatcatttgactgatggtgaaaagaacgatgttaaggacgaaatagggaaagaaaacccagatctaccaaagggtacagaagttgacgtagatgataagggtaacgcaacaataaaatatccagatggttcaaaggacaccataccaggtgaccaattagttcaaggccaaaagggcgacacaactgatgctggtaacattacgccaactgttccaggtgacaaggtaactgttaaggatccaagtcacttaactgatgatgaaaagaatcaagttaagaacaacgtcgataatgtcaacaaggataagttcccagcaggcacaggtattacagtaggcgatgacggtaccaccacagtaacctacccagatggcactaaggacaccattccaggcgatcaactagttcaaggccaaaagggtgacacaactgatgctggtaacattacgccaactattccaggtggcaaggttactgttaaggatccaagtcacttaactgatgatgaaaagaatcaagttaagaacaacgtcgataatgccaacaaggataagttcccagcaggcactgaagttacagtaggcgatgatggtacaactacagtaacttacccagatggttcgaaggatgtcattgctggtactgatttagtcatcgctgctaaaagcgaagatgttcctggaagcaagcatcattcacacaagaatggttcaaactctagtcaagttgatggagttaagggagcttctactgctaatggcagcatcgcaaacgctggtaacaacctaggtgttaagggtgaaagagataatgctattggtaataacaaggctactagcttaaagacattaccacaaacaggcactaaagatacttcaattttgggtgtgcttggtatgcttttagcttcacttggtctattcgtatttaagaagaagcgcgatgaaaaataatttataatagttttttataaattctattgataaacatatctagagaaagttaattctcagatttaaaaagacgatcgaaaacttttgaaaaattgtttttgatcgcctttttgtgtgaaatgaaaacaagattctacgtaagcgtaaaataaccgagtatctagattagttttagatttcaattatgattaatttatcaatattttggaggttatttatatgtcagaaaaaaagctaatcgtccctcttgctcgtgagccaaaagctaaaaagtctaagccagctcgtaatcatttactgctttctttaaagaaaaatgacctagaattagacttccaatgtcattaagttaagctattgacttttgaaaactgatctttttaggaattgaatcatttggattcgattcttttttttgcaaaaataaaggcgaaaagacaaacgaaatttaaaagccaagtctgcagtatattacatgtatcgcgtggcctaataaaaaagaaatacaaactacgcttatttggcgtacacaaaaaagcatcaaattggctatctaaagccaaatgatgctttaattgtttttttctccaatgtcaatagcttaacttaatgacattgattaaatttgcgggctttatttatttttatattgccaacccaacaagcgagaaaataatttcactaattagtactaatagaacatttactaagatgcctgtaaaggttgattctttatgtggattttttacgaaagtcttagttgtgtggtaaacaagcggaatagtaagtaaactccctaaagtaataattggcaaatattttaatactatttccaatattaaaaagatgtaggctaatacatagtaacaacataaaatagtcagggcagtttttcgacctgtatagtatggcaaggttttacgtccgattttgacatcttcagccacatcgcagatgttgttggctaacatgacattggcaatgacaaaaattgccggtccagcaacgataatggctttagcccagaaaaaattatcgaagggatgcacgttatacatgttgatatataggcctaaaaatgtaatgttgtagcccattgtaattcctgaagctggttcaccaaaaggagtttttaaaatggggtaagggccacctgagtagcaatagccgattagatagcttaaaatcccgattaataaaataatccaaccgactttaatgctaaggatagttccgataattacagaaattaacgtcaaaataatgattatttttcgagcccagcttttcgtaatattaaatttctctaggatattgttgtagctagttatatggttttgcttataacgtgcgtaatctgtgtattgattatgaccattaactgctaaatgaaagcaaatcacagctaaaaatagccataatgaatagactagattaaagttgtgataatagtagctagccatcaccgagccgataatatatggcagagccgagataataattgtttggatttggaccaaggcattgaatttttgtagtgtagaatattttttcattggttcctccataagtattaaatagccattatcttcagtataaatagatagttataatttacaattatcttgggtagaaatcttattgtttagaattaagaaagcttaatattattttttgtggtggtcgatgtaagtcagcaaagccaacaaaagcatcaaaaagctactctcgtaaaccgacatggttgaactctttctgtagtatgttgaccattgttaaaaaaggtgaacgcgtaaaatactaaatttttactctaacaaagtgtctgggaaaaagtttatttttaattaattttagactttcactcaaaaaaatcctaataaatcaaggtttattgataccaagatttattaggatttcttaatttctgagtttttcccagacactttatttagactattttcttaacttgtgcaccttatgggctagaaccatttctttattgcgatcttcatagatcatatccttgatgtaattccatgggattaacaaaggcgttttgctatttttacggaaaatgaagtctgcgtgtcgtctttccaagtgacgcaaatatcttttagcattttgaatcttagtatggtgttccaaatgcaatcgtggttcgaaatcgacgattttgtgttcagcgttgaaaataggtctaactttatggtgccagttctcagcactagagatatgatcgctgaccttttttccggcttctacgatattctctttggttgctggacttttctgatccttaaactccgcatgtggatctagatagtagttgcccaaaccatcttgacgataaagtcgtattttcttgaatgtcttatttttcttatccattcttacttcgataacgtcaccatttttgtgattcattaaatacatgtgatgttttctagtgtaatttgcacttttcatgatcagaaatctcacctctacattaattattctgaaacgatattataccagtattttaactatatttttgctttacgagtataaaagtttataatttttaaaaagaaatttcaattcttgagaattagagaaggaaaaaagagactgtaaaatagtttgtgtaaggatgaatgattccttaaatttatttctttaaacattagaaaaaggagttcctttctcgtatgattggtttgaacaaaaaaacacatacagaaagaagaactccttcatgaatgattttaccaaagattttgctcaagctctattcaatccagacaaaataaatgatttattgcgcaaagagctacaacaggctgttaataacttgttagaagctgaattgactgcctttctgggctatgatccctatgccagaaatggctggaatactggcaactctagaaatggtgcttatttccgcaaagttgatacgcaatttggcccaattgaagtgcaagtgcctcgggatcgcaacggtcaatttcatcagcacacgctgcctgactacaagcagcactcggatatcttggaaagcatgattatcaagctttactccaagggcgtgaccaccagggaaatagccgatctaattgaaaagatgtatggcagccattacagtccagctcaggtatcaaatatttccaagcagatgattccaaaggttgaggcttaccacaaacgcaagctaagcgacaagtttttctgcgtctatttggatgcgacataccttcctttgcgccgagaaacatttgagcgtgaagcagtctatattgccattggcatcaagcctaatgggcacaaggaggtcattgactactgcattgcacctagcgagaacattgaagtctggacagatatgcttcaaaacatgaaatcccgaggcttaaagcaagttgagctttttctttctgatggtgttgttggcatgaaaacagccttggccaggacttatcctaaagctcattttcaacgctgtttggttcatgtcatgcgcaatatctgcgctaaagtacgcgtcgacgatcgtgaaaagatcatgaacgaattcaaacaggtgcatcaacagacaaacaaagaagaagccacagctgtcctgcatgacttctataccaaatggggcaaggtttacagccatgttatcagaagcttgaaagacatagaaccagatctgctggtcttttataactatcccaagcagatcagagcttcaatttattcgactaacatgattgaatcatttaacaatgtgatcaagcgcaaagctaagcctaaggcagagtttccaactgaacagtcgcttgatgcttttattggcattcaggcaatgagctacaatgaccgttatttcaatcgaattcataaaggctttggtcaggttcaggacaccttagaatcctactttgattaaataaataattaaaaaatcaatttacgagaaagaactatttacacaaaagatttgacagtttcggaaaaaatcctaatgaagaaacttaatatattttattatgctaccatttggagttttattattggaatatgctgtgctacatatttaaacttaattaattttattattaattttgtctggcatgttttgtttgataaattacctgttcctagtcaggctttaccgttttttatttgtattccttttggtttcattattggtatattaattaagcgtttaggatcatatccattaactatcgaagaagttttaatgagtgttaagcaggagggaaagatcaattatcacaattggtggaaatccttaaccttaggtcttatttctttagccgcgggtggcagtattggaccagaggcttcaactactgtactaggaagtggcatggttaattggctgggagatagattacgactaattgcttattcttctgattggaaatggaatcatttttgggatactatcgtttcgaaaaaacaactaaaaaaactgccaaaatttagtagcctttttaaatcaaaattgtatcaaaaagttttttgcttaattatggttatgatcggcgtggttggtgcagcaatagtctttaaattattccctgaagaaggattatttggtattcatcatcgccatattctctggcaatggcgctatagtatgtatgtaattattctattaattgtaggttggagcttcggtatgtttttcttatggagcgaaaaatggagtgattattttgctaaaaaaattactatttcaccgattattaaagcaactatatggggaatagttcttgcattacttaccttaattactagttatgccctgtattctggtgaatttcaaattgttccatttgtacaccaggcgttgcaaatctcaccattatttttgctagttatagcagtcatcaaaaccttgtctactaatataggttttagtttaggctggcgtggtggaaaaattttcccttcgatttttgctagtgtagcagttggcgcagcgattgcgcaatttttaccaattatgccagttatgtgtgtagccattacagttagtgcaagtattgcagttatcttgggtaaacctttattaacagctattttattgattctgttattaccaatagagttggctcctgtcattttagtaagtgcgtatttatctgcctgtttgacaaaagtgagctatagttttagacaaaagaataattagggaggtatttttatgaacgaaaaaaacgatgcagtaactggtgcttctttgatagagaatcaagaagaaaaagtaaaaagcccatggccgggtcctaaaggtatgattcctgtaacaagtgggcgtgctgacgatgctaatgtacataatcgtgcctacttagacaatatcttggtggagatgcgtttgcttgattcagttgagccagacttaacaactgagatttttggtaaaaaatatgcctcacctttaactctggctgcagtctctcatttgaacagggttttaccagataagacgcgtaagccaatgcaagaaaaggcacgtgcggctaagaataccaatactttaaattggattggcatggagtcaaacgaagaatatgccgaaattgtcaaagagggcggcgatacagttagaattgtgaagccttacgcagaccatgataaaattatgggcgaactaaaacaagcagaagaattaggtgccgtagctgttggaatggatattgatcatgtgcctggtgataatggtaaatatgatgtagtcgatggtattccactaggaccgatttcatttagcgatcttgaaaagtatgttcatgcagttaaactgccgtttgtggctaagggcgtgctatccgtgcgtgatgccgttaaggctagagatgctggtgccaaggcaatagttgtttcacatcaccacggccgcgttccatttggcgtgccgccactaaaagttttgccagcaatcaagcaagcactaaatggcagtggaatgaccatttttgtagatggatcattgatgactggctacgatgcatacaaggctttggccttaggcgcagatgctgtactgattggtcgcgggattctttctgaattgttaaaagacgggcaaaaagcaacagaagataagattaagaaaatgaatgagcagcttgcacaaatgatgttatatactggcgttaaagatactaagtcatttgatcctagtgtgttacattttgattaggatagaaaaatgaaatagtttattttttacagtttactataattaagtggctattagcctataataaaggcgtttaaagctatactgaatagtgttatgcttaactcggacgttgttataaggtaattatttaaaagtaattagttgtatacgaaaacatgcttagctatggtaaaagctaagcatgatgtctcataatattgagccgcttgtagattatactacaagcggttttattttagatgaaaataacaagttttcaaaaagtgagtatctatgttttgctattatggaaatggattgatttagaaaatgatgctattgaaatttcattatgagcggggatgcaaaaccttttttaaaaagcataagaatgagcaaaagataattaagcagttaatcgatcaagcgattactaaggaattggcaactggtatgactaaagtgaagatcgctgcaatgactcggattaagggaaaatcaatttacgagtttcgcctaaatttgaaaaaagcgggttcagcgagagtcgcttttgcagtaaaggatgagcaagtactagttcttttgattacctctaatttacagaaggatagttttagtcatgaattagaaactgttctgaaaggaagtcattatgcgtttaattccaattaagcaggcagagactttgctcaaaaaaatgtgtagtaataaaagtaaatatgtagaaattaaattattaacggcaaaaaaggatcgttcaattagtgtgaaaaatgatggtaaaaagctaattttaactgaagatggctatttgaactttacgcaggaatatgaattgactgatccagctgttggccgtcatgcagttttagcggcttttaaaaaggaatttccgcgtagtaatcgtgcatatctgattgctaaatagtatactttaactataagaaaaactatcagtgttgattagaaaggaagtctttttatcaatgaaatatgcagaaaaatctcccgcattatgggatgccattcatcatgaagaacagcgccaacaagacaccatcgaattaattgcctctgaaaatattgtttctgatgcagttcgtgaagcacaaggttctgttttaactaacaagtatgctgaaggatatcctggtcggcgttattacggcggttgtcaatatattgatcaagttgagcaactggctattgattatgcaaaaaaattgtttaacgcaaagtttgctaatgtgcagccacactctggatcacaggctaacatggcagtttatcaagcacttttgaagccaggtgatgtcattttaggtatgggcatggatgctggcggtcacttgactcatggatccaaggttaacttcagtggtaaggaatataagtcttacagttacggcctaaatgttgagactgaagaactagattttgatgccattcgtgaaattgctcttaaggttaaacctaagttaattgtagccggtgcttctgcgtacagccgcatcattgattggcaaaagttccgtgaaattgcagatgaagttggggcatacttaatggttgatatggctcatattgctggcttagtagcaaccggtcaacatccaagtcctgttccagtagctgatgtagtaactacaactacacataagaccttgcgtggccctcgtggtgggatgattttgtccaacaatttagaaattggtaagaaaatcaattccgctttgttcccaggcattcaaggtgggccacttgagcatgtcatcgcaggtaaagcgcaagcattttatgaggacttgcaaccacaatttacagattatattaagcaagtcattaaaaatgctaaggcaatggcagaaacttttgctgaatcggacaatattcgtgtcgtatctggtggtactgataaccatttgatgattatcgatattactaagactggtattaccggtaaagatgctcaaaatttactcgactctgttcacatcactaccaacaaagaatcaattccaggcgatcaacgttcaccatttgttactagtgggttgcggattggtacgccagtaattactagtcgtggctttgatgaagcagatgctaagaagactgcggaaatgattattgaaattttatctgatccagaaaatcccgcaacgattgcccacgttaaagaagaagttcaggcattaactaaaaaacatccaattgaataatttgtgtagcagaatttagccgtcctagttctcagctggggcggcttttgttataataaaaaattaaaaataatggagttaagagtgaaggaaacgtgattatttggaaaagttaaaaagacataaaataggcttattttcagcgattatgctggccttgaattctttaattggttcgggctggctttttggttcaggttctgcagcacaaattgcaggtccagccgcaattttatcttggattttaggtgcagtaattatcatctcaattgcattgacttatgtagaattaggttcgatgtttcccgaaagtggcgggatgagtcgatacgctcaatatagtcatgggccgttattgggctttgtggctgcttgggctaactggatttcactagtcacattggtaccgatggaagccgtagctgccgtgcaatatatgagttcttggccctggagctgggctaactggactaaaaattttattaaaaacggcagtattacttttgctggcttaggtgtggttattatttttatgctgatttttacaatgatcaattttgggtcagttaaaatcatgacccattttaccaatttgatttctatttttaagatcttattgcctactttgacgattacagttttaattgcttcaggttttcatggacaaaactttggcagtaatttacatgaatttatgccttatggtagtcggtccatttttgaagcaacttctgtttcaggaattattatgtcttatgatgcctttcagacggtcatcaatatgggtggggaattgaaaaatccgcgtaagaatattgtgcgtggggtattgatctcaatgttaattactgcggcaatctacattatgttgcaagtgacgtttattggtgcagttgagccaggcatgttagctaaagtaggctggcatgggatcaactttacctcaccatttgcggacattgctattattttaggcattaattggctagtgattttgctctacctagatgcatttgtttcaccatttgggacaggggtagcatttgtagctacggcctcaagagccctagcggcaatgacacacacacgtcatttgccaaaatggttaggtagattgaatcaaaaatacttaataccacgttatgcgatgattgctgactttgttttggcggttattttagtaagcttatttagaaactggaatttactagcaacagtaatcacggcctcaactttgattgcatatttgactggtccagttacggtaatgactctaagaaagaaaagaccagatcttgatcgtccatttaatcctggttatatgaagtggctagctccagttacctttatactaactagtttggcaatttactggtcaatgtggccaacgactattcaggtgataattgttattgccttgggtttgccgatttatttttattatgaaattcactaccaacattcaaatttaaaagaacaattacatagtagttggtggatgatcggttatttgatttttatgtcacttatgtcctttgtgggcagtagcggttttggtggtcagaactggattaagtatccatttgactttgtagtaattatcattatttctctcgccttctattattggggaattaagacagggttaaagaaaatcgatccttatgctgaaaaaattgcgcaaaataaagaataagtaaaaaaactgttgggatttttagtctcaacagttttttgttcgctattctgcttcatcaagatacttatttagcaccttgaaaacaccgttgtcgttattagtaggtgcaataaatttagcagtctttttaacgatatcttgaccattagccatggcataacttaaaccagcaaatttcaacatttcaaggtcattttcaccatcaccgaaggcaattaattcacttcttggcacgtctaaataagctaaaaattcctttagccctgcggctttatttacaccttcaggaataatatccatgtagctccaaccactagttgtgacgtggattttttctgtactacggctgttgaagccatgttctaattcatgtcgaatcttgctgggatagtccattgtgatcttagtgtattggtcatcagcaggaattttattaaaatcatcaatttcgatgctattaggataaaaataatgatgggaccgcttgtattctggtggtgtactttttaaaaagtaggagtgcttaacgccactaattaaaatgttttgggctgcaccaggatagcgtgcgtgcaaatattcaataaaatttaggatgcatttttttgaaaagcttgttgtacgaataatttttccatcgcgaactaagaccgcaccattgtcggcaacaaagtcaatagaatcgataaattcgctaaagtcatcagccaaacgaccagctgggcggccgctagcaataataaaatgtgccccgtgttgatgcagacgagttaaaatctcgctaaacatttgatgatcgtattgtttttcatcgttaacaaaagtaccgtcaacgtctacagcaacggccttaaagggaagagtagtcatctaattacctcactaaaatttgataccgttaacagtttaccatttcttgcaagtgcttacataaattatttatattatgtttaacaataaatttgaaatttacgaggtagaaaaaatgacaccatggtggaaaaaagcagttgtttatcaaatttatcctaagtcatttcaggacagcaacggtgatggcataggtgacttacaaggaattattgctcgtttagattatttggaaaatctaggagttgatgcaatttggctttcaccggtctatcaatctcccggtgtggataatggctatgatatttcaaattatgaagcgattgatccgcaatatggcacgatggctgatatggatgagttgattcagaaagctaaggagcatcatatccgaattgtaatggatctggtggttaatcatacatctgaccagcatcaatggtttgtggaggcacgaaaaagtaaggataatccttaccgagactattatatttggcgtgatcctgttgatggacatgagcccaatagtttgaagtctgctttttctggttcagcttggaaatttgatgagcaaacaggacaatattatttacacttctttgcggaacaacaacctgatttaaattggaaaaatccagagttgcggcaaaaaatctacgatatgatgaacttttggcttgataaggggatcggtggcttccgaatggatgtgattgaattaattggtaaagatcccgacaaaatgatccgtgaaaatggtccgatgcttcatccatatttgcaagaaatgaacaagaatacatttggtgatcgagatgtgatgacggtgggcgaaacttggaatgcgacaccgaagattgcagaagagtactcagatccagcacgtcatgaattatcaatggttttccaatttgagaatcaagctttagaccagcaggaaggaaaagaaaagtgggatttaaagccgctagacttaggcgaattgaaaaaggttttagtaaagtggcagacagagcttgattttaatcatgcttggaatagtttgttctgggaaaatcatgatattccgcgcgtaatttcacgttggggcaatgataaaaaatatcgggtgcagtgtgctaagatgtttgcgacagttttacatttgatgcacggcacaccatatatttttaacggtgaagaaattggtatgactaattgtccggtaaaaaatattgatgaagtagaagatattgaaagtgtcaatatgtatcatgaacgtctggctgaaggttatgacaaagataaactaattcatgcgatcaatgttaaaggcagggataatgctcgtcgtccaatgcaatggaatgatgagaaaaatgccggctttactaagtcaaagccatggttgacagtaaatcctaactacaaagaaattaatgtgaagaaggccttggctgatcctaattcgattttttatacttaccaagaattgattactttacgtcatgaaaatgagattgtggttaatggtgactttaagttggttcatgatactggtgatgaagttcttgcatattatcgtattttaggtactgaaaagtggttggtggttgctaacctatctggtgaagagcaacagtttacgtcgaccgatcgcattaaagaaaacttgcttagtaattatgctgtgcgtaatgatctgcatgatattacgcttaagccttatgaagcatttgcagtggcaattaaataagctaaaattaaaaagaacttgaattactaacttgaagatgttattctagttatcgttaatcgattaatctatgatctgtgatatgatcatggcaaaggagtaataaattatgaaacaaggtattcatccagaatttcaagaagtagttttcatggactcagcaactggtgctaagttcttagctggctcaactttgaagccatcagaaactattgactacgaaggcgaaacttacccattagtacgtgttgaagtttcatcagattcacacccattctacactggcaagcaaaagtttgctcaagcagatggtcgaatcgaaaagttcaacaagaagtacggtttgaagaagtaaaccttttatctggtggaagcagtcccattggggctgcttttttcgttagagattatttggcagaatgcatgaaagacagtataatgttttctgtataaaaatgtttttatgggagtaaatattcaatgaaaatgcaaatggcggaaattgccaaggctttaaatactacttgtgaaggtgacaatcaaactgttattacttctgttgcctttgactccagaaagatcacagatggtggattatttgtaccacttgaaggtgaacgtgatgggcacgaattcatagctagtgctattaataatggtgcttctgctactttatggaaaaaggggcatccgaacaagccagaagatattgcggttattgaagttgatgatccacttgctgctatgcaagagcttgctcgctattatttgcgtaaggttaatccaaccgtagtgggaattactggttcaaatggtaagactactaccaaggatatgattgctgctgttttgtctaaacgctttaatgtacataaaactcaggccaactttaacaatgagattggtgtgccaatgaccattcttgagatgaagccaaatactgaaattttggtgcttgaaatgggaatggacagaccaggtcaattgcatcatttaagtgaattaacccatccagatgtggccgtaattacaatgattggtgaagctcatattgaattctttggcagccgcgacaagattgcagatgctaagatggaaattactgactttttgcgtgaagatggcgaatttatcttcaatggggatgaaccattattgcaagaacgtgctgagaaattggatcaagctaaagcaacttttggttttagagatgaagatacagttcatgcaactggctttaagagttatatgcatcatgctacctttacagttaatgattcagagcaaaaattctcaatcccaatgattggtaaacacaatgtttctaacgcaatggccgcaattagtgttggtcgtcattttggtgaaagtgatgaggaaattgcctcatcattgtctaactttaccccaacggctaatcggatggagtgggaaaaaggcgatgctggcgaaagcatcatgagtgatatctataactcaaatccaactgctgttagagctgtattgactagttttggccaagttgaagtaaaagatggtggtcgtagaattgctgttttaggtgatatgcttgaattaggtaaaaagtcgccggaattgcatgctggtcttgcagatacaatggatccccagattattaacgaagtttacttatatggctctgaaatgaagaatttatatgatgctttacaaggcaaatatgagccagaacatttgcattattatacacaagaacaaacagatcgaatgattgatgatctgaagaacgatattaagtcggatgacattgtagtattgaaaggttcgcatggaatgcacctagaaaatgtcttagcccgactgagataggagaaaaatttttttgaaattttcagaattaggattaaatgatgcgcttcttaaagcgattaaacgttcaggctttgaagaagcaactccaatccaagaacaaactattccccttgctttgcaaggcaaagatgtaattggtcaggcccagactggtaccggtaagacagctgcgtttggcttgccaattttacagatgatcgacaaaaaagaaaaagcaattcaagcggttattattgaaccaacgcgtgaacttgctattcagacgcaagaagaattattccgtttaggtcgtgacgaacatgctcatgttcaagtggtctatggtggagctgatatcggtcgtcaaattcgctcattgaaacaccatgtaccatcaattttagttggtacgccagggcgtttgcttgaccacttgaaacgcaaaactattaatttagatcaagttaaggctgtcgttctagatgaagcagatgaaatgctcgatatgggttttattcaagatatcgaaagtattttgaaatatgctaagaaccgacaacagacattactctttagtgctacaatgcctaagccaattttgcggataggcgaaaaatttatggatcacccagaaattgtccgcattaaagctaaggaattaactgctgatttgattgaacaatattttgttcgtgctaaagagtctgaaaaatttgatattatgtgtcgactaattgacgtgcagggtccagatttggctttagtctttggtcgcaccaaacgtcgcgtagatgaacttacgcgcggtttgcaagcgcgtggctacaatgcggcggaaattcacggtgatctatcgcaagcgcgtagaatgtcagttttgaaaagatttcgtgaaggtaagctagatattctggttgctactgatgtagctgcccgcggacttgatatttcaggcgtaacccacgtttataattatgatattccccaagatccggattcatatgttcaccgtattggtagaactggtcgtgcggggcaaaatggaatctctgttacttttgttacgccaaacgagattggctatatgagaaccattgagcaattgactaaaaagaagatgtcgccgcttcgtccgccaacagatgatcaggcattacatggtcaattaaagcaagcaaaaattgaaattgaagatttgatgaacggtgatttgggtaaatatacccaaggggcaagtgagctgctggataactattcagctctcgacttagttgcagcctttttaaagaacttggctaaagatgaggttaaagtcaagattaccccagaaaagccgttaccatacaagggtgatggtcgccgccgtcgtggtaaaggtcatggccgtagcaataataatcatggacgcgataaccaccgccgtcgtaacaataattcataccgccaaaatggaaaccgcggtaagcgtggtcgtggcaacggacatgaatttgtaatcaagaataagaaagattaagattttatcttaaaaagggaagttgtaatttttacagcttcttttttgtattataatgatgtcattgtgtgaggtgaaaataatgattaaaggagtaggaattgactcgattgaagttgaacgagttaagaagatcgtggacaagggggatgcttttgccaaaaaagtattaactcccaaagaatttgatcaatatcaaaaaatggcaggcaaacgtaaagttgaatacctaggcggacgcttttcattaaaggaatctttttctaaagcaatgagaacgggtctgggaaagtatattggttttcaagatgtcgaaactttatgggatgatttaggtcatcccgttatgacttcaactaagtttgatggaaatattttcccaagtatcacacatgataatcatgaaattattacatttgtagttttggaggaaaaataaaaatatggttccaggctatcaccgtccagccgttgtaaaggtaaatttgggcgcaattagaagaaatataaaaaacgaaatgaaacatcttgcaacagggcaaaagatgttagctgtagttaaggccaatgcttatggtcatggtgcagttgaggtggctaaaattgcgattgaggaaggtgcagcaggcctttgtgtagctattttagatgaggccttgcaattgcgtcatgctgacattgttaagccaattttagttttgggagtagtttctccagaatacgctccaattgcggccgcaaacaatgtttcattaacgattcctaaccttgaatggctaaaggaagcagaaaagtaccttgaaaaagagcagttacagttgaaagttcatattggagtagattcaggcatgggtcggatcggctttaacgaagatgaggattttattgctgctaataaattcttacaaaataacgataatttctacgtagagggtatgttcgcacactttgcttccgcagacagtgctgatgatacttactttaagcatcaggtagaaaaatttgctcatatgagaagtttgttgacagttaagcctaagtggattcacgtagacaataccgctgccagcatctttaacaaggatgtgcctagtgattgtgttcgttttggaattggcatttatggtttgaacccatcctctaatcctgatagtcctgacttgaagtcatcaatttcgcttgaaccagcattatcatttgagagtgaactaactcatgtaaaaactattcatgaaggtgacggagtaggatatggttctacctttgtagctgatcaagatacaattattggaactgtgcctgttggttatgctgatggctttattagaaagtttcaaggctttaaagttaaagttggagacgaatactgtccaattgtcggccgaatttgtatggatcaatttatggtcaaaatgccaaagaaaatgccgttaggaactaaggtagtcatcatttccaatgatccaacagcgccaaataatattaaggccgccgcagattatgttgatactattcactatgaagtagcatgtttgttaaacgatcgtttacctcgtgtttactatgaaaaataagttaggcaataaaaaaatgcttctagaacaaaaatctagaagcattttttggtagatcagttttttaatccttaacagggtgttcaataaagacacctggattttcatcactcataatagtcatgccggcttgcaaatcttcgatttcagaaactacgaaaccttttctttgtaacttatcaacaatcgttctcatggtaatatctgagacaccagcggggagagtaaagagtgttcttctaacaaaattaccttcgagttcgccagcagctgcatcaagtgtcattacactagacatattagtgtgcttagacacaatcttggacatcttgatcaagttaccacgtgtattgtcagataaaacggtcaaaacgtatgaaccatttttaacatcccacgcatctgacaacatatcaagcattcttgagtgagtaagaataccataaaaatgattatcttcatcaaggacagcaatataaggtaagtccttaatgttgaaaaataccttgaagaatggtgaattgaccttaattgtcttagtggcattcttaagtaagtaagttactggtagattcatatcgccaccttgtgacttatgacggtagatatgcatcttataaatgttaccacggaaaatagtaccagtatcgtcaacgattggcacacatctgtagcctgaatcttctaaaacttttaaagcttctgctaatgtggctttttcattaactgttgttaaataatcttttttaataactaaagatttaataagcatgagttcgcctccgaaagtgagaaatgtttcaagtaattatagcatagttgatgagttaattaaatattaattaaagttcatctgaagtaacaactatattttaacaatagttagacaaataaaaaagcatctccgaaaaaagagatgcttttaagtgaaacaagttttagattattgacgaaccttaacgccagtttccttaaatgccttgtccataaccttcttcaattgatctgcagaagcagtcatcaattcttgttccttgtcacttaatggcatttcaatgatttgttcaagacccttacggccaacaactgcaggagtaccaatgtgaatgtcatgtaagccatattgaccgtccataggaactgaaagtggaagtacacggtgttcatcgttcaagatagccttagcgatcattgctgaagcagtaccgattccgtagaaagtagcacccttcttgttaattatttcgtaagccatgttagcaacttccttgtggatgtcttcaagcttagattcatccataccgtgagccttaacccagtcactaacctttacgccaccaacattgttgtagctccatgctgggaattcagtatcaccgtgttcaccaagcatgtaagcattaactgaacgtgggtcaacatgttccatttcaccgataaccttttgaagacgaccagtatcaagtgaagtacctgaaccgataacacgatccttagggaaacctgacattttccaagttgcgtgggttaaaatatcaactgggttagcaacaactaagaaaataccttcaaagcctgattcaacaactggttcaacgattgatgataaaatcttcaagttcttgttaacaaggtcaagacgagtttcgcctggcttttgtggagcaccagcagtgataactactaagtctgcatccttacagtcagggtagtcagctgcatagatattctttggtgaagtccaaggggtagcatcagctaagtcaattgcgtcaccttcaacgtgttccttagcgatatcaataatacccaattcttcggcgataccttgttgtaccattgagaatgcgaaggttgaacctacagcaccatcaccaacaagaataactttacgaggtctttcatctcttggcataaataaaaatctccttttttattagtgatatttttaacaaaatgaattataccatgatagcaagcattaataaaattattatttcctaattgtgctattatatgtaagattgtgtgcatagtgaggagtaaaaataatgaagataattgcaggtttaggtaatccaggacaaaaatatgataaaacaaagcataatactggtttcatgacaatggatcattatttgaatgaaaagggtttgtcactggataaagataaatttgaaggtcattggactaagcaaaaaataaatggtgaagatgtaattttgcttgagccgcaaacctttatgaatgaatcaggtcgttcagttagtcaagtggctaacttctttaaggttgatccagcagatgtgctaattattcaagatgatatggatatgccaattggtaaaattagaattagagctaatggcaaatctggtggacataatggaattaaaagcatcattcgagatttagggacggaaaagtttaatcgtttgaagattggtattcgtcatccgaaaaatgcaacggttgtttcatgggttttgacaccatttaatgatgaacaacaaaaattgatggatgatgcatttgcgataagtgtagatattattgacgactttatcagcggacatggtagtcaatatttaatgaataaatataattaaaatgcgtttaacagagattttagataaagatcaagatttaaataattttatttcaaaaacaaaacaagtaaaaaattcactaatcactggcgctaatgccggtgcttttagtctattgctaaaacagataacaactaaattagcagctccacttattttaattgaagaaaacgaaagtaaagcacaaaacttatatggtgaactcagtgccattatggcagatgaaactgtgcaaatttttccagtagatgctacaattgcaacgcaaacggcagttagttcgcctgatgaactgagcagccgaattcaggcacttaattttttgttaagtggtaaggcaggaatagtggtaacaacgccgcaggggctgcaatacaaactgaccaatccaactgattttgcgcaggcaaagcggagttttgagccaggtcaagaatatgaactaaaagaactcaatgaatggttgcttgcttcagggtatcagcgtgattctttggtagcacgaccaggcgaattcgccatccgtggtgatattttagatgtttatccactagatcgagaaaatcccgtgcgaatcgaattctttggtgacgaaatagatacaattaaggaattcgatttagctagtcaacggagtcaaaaagagttagacaaagtagaagttgcagcagctcaagatcgagtttttactaaggatgcaattgcggcagcggctaagaaaattgaacaagatatggccagtgcaccagctcccgctaaagctgtcaaggaccactttgcggcagttcttgatgaattaaacgatggcggtttacctaaaaactatgctttcttaattgactatttgcttgaaatttctagtagtttactcgaatatttgcctaaaaatgggcagattttatttgacgatttgcctttaattaatcaagcggttgaaacagttgataagcaaaacgctgcttttattaatgatgaactaaaaactggtgcaatgttgccagggcaaagcttgcggtcagattatacaaagattctgagcaaagataagcaccatcgtatttatttctcattgtttcaacgaagcatgggacgactgcgcttaggccagatgctcaattggtcaacacgtgagccagaacaattctttagtcaaatgccgctgattaagtcagaattagaatcttatcaaaaggcggggcaaaccgtcattttacaggctgataatgaaaaaagagcacagcaaattgatcaaacaatggttgattttggcttaaatttaccaattgttggtgcagacgaaattgttgaacaacggacacaaattgtagttgatggctttgttagtggctttagtttaccaacagttaaattggtatatctaacggagcgtgaactatttaataagcgcccacaacgtaaaaaaagaattaagacactggagaatgcccagcgtttgcgcaattatactgaactgaagccaggggattatgttgttcatgttaaccacgggattggtcggtttgaaggaatcaagactttagaaaataatggtaccaagcgtgactatattacgattacctaccagcatggtgatcagctttttgtaccagcagatcaattaagcttagtacaaaaatacgttggttcagaaggtaagacaccacatattaataagctaggtggtagtgagtgggctaaaaccaagcgtaaggttcaatctaaagttgaagatattgcggatgatttgattgaactttatgccaaacgtgaatcagaaaaaggctttgctttttcacctgatgatgatctacaaaaacaatttgaagatgcctttccttatccagaaacacctgatcaattgcgatcggttaaagaaattaagcaagatatggaaagctcgaagccaatggaccgtcttttagtaggggatgttggttttggaaaaactgaggtagccttacgagcagcttttaaggcaattcaggataataaacaagtagcctttttagtacccaccactattttggcgcaacaacactatgagacgattcaagatcgcttcaaagatttcccagtcaatactactatgctatctcgttttcaaacgccagttgaatcaaaggaaattattgaagggctaaaaaatggcaagatagatttggttgttgggactcaccgtattttgtctcaagatgtaaaattcaagaatctaggattgttaattgttgacgaggagcagcggtttggcgttaagcacaaggaaaagttaaagcagttgaaggcaaatattgatgttttgacattaacagctacgccaataccgcgaacgcttcatatgtcaatggtaggtgtgcgtgatctctcagtaatggaaacgccacctcaaaacagataccctattcaaacttatgtgatggaacaaattcctagtgtagtaagggatgcatgcttgcgtgaaatgcaacgtgatggacaggtcttttatttacataatcggattagtgatatcgatgaaactgtcgaaaaactgcaggaattgatgccacaggcgcgaattgcagctgcccatggtcgaatgagtcagaatcagttggaagatattctttatcgcttcctgaatcgcgagtttgatatcttggttacgactacgattattgaaacaggaattgatatgcccaatgtcaatacaatgatcattgaagatgctgaccactatggtctaagtcagttgtatcaattgcggggtagaattggccgtagtgctcgtttggcttatgcttacttcttgtataagccaaataaagttttaactgaggttggtgaaaaacggcttgatgcgatccgtgacttcactgaactgggttctggtttcaaaatagcaatgcgtgacttatcaattcgtggtgctggaaatatgctgggtgcacaacagcatggctttattgatagcgttggttatgatttgtactcacaaatgctggctgatgcaattcaagaccgtaaggggaagacaacaatcaaaaagtcaaacgcagaaatcgaccttggacttgaggcttatattccagattcgtatatcggtgatcaagaagaaaaaattgaattttacaaaaagattaaagccgtctcaagtcaggaaaaattaggtaaaattgaagatgaattaatcgatcgttttggtgactatccaacggccgtcgagaatttattagctgttgccggtctaaaggttgatgctgacatggctcaagtgctcaatgtggttaaaactgacgataagattaaagtggaatttacgaatgcagcttcacgcaaacttgagggacctaatatttttaaggcattggagcatgtaagtttaaaggctcgcattagtatgaatcaagaaaaaagaatggttgtcttgctattgttgccggataaaatgaagaatcgtgttttattcaatgaactagcaacctttttacaggcagcaagcgacattgtacaaaggtaactgtaggagaaaaatatgaggattgataaatttttaaaagtttcacgattagttaagagaagaaccgtagctaaagaaatggctgatcaaggtagaatcaaagtcaatggtcgagttgtaaaatcaagctacgatgtaaaaattgatgatattattgaagtaggttacggcgccaaaaccatcaaggctaaggtgttaaatattcgcgagaccacgaaaaaagcagaagcaagtgaactgtacgagctagttgattaatgacttttgattaaatcgttgttatacttgacttagtatagttatttagtaattaggggattaaacaatgaatcatggtccacgtatatataattcgttgagtccagaagagcagagggcgcgtcttagacgtaaacaggctaaattagagaaagaaacacaccgcaagcggttgaacgtaattatggcagtttttgctatcattttcgttgctttaggtgtacagattgcaatcaagatttctcaaactggacgactgaataatcaagtacaagctgaaaaacagactttaactaaagtaaaaaataagagaaatgacttagaaactgaaaagcaggatttgaaggatccaaattatgttgctaagctgattcgttataaattctattattctaaatcaaatgagaagatttataacgtgcatgaaagaaatgatgataactaatggaaaagtatcaagctggtaatcgggtgactggtgtaattaataacattactgacttgggcatctttgttactttacctaatcggcattctggtttggttcatcatagtgactttggcaataattggctacgcgaacgtcgtcgttatcatgctggcgatgaagtgcgcgtggttgtggtgcacatccataaagggagatttaatttatcgatcactcgagtgaatgatccggaattagttgaccatgataatcaattttctaagacaaagccagctgattttgatcaagtcctgaatcaaacaacgcgggatgctaaagaagaaattgaaaagctaaagcaagtattaactgagaattaagagatggtccgaaagggccattttttgttagaaaaataatgaaaattaatgatttttttgaacaacatcagattgacttaaaggataaaagactattagtagccgcaagtgcgggaccggattccatggctttactagatatgctagttaatttgcaaaaacaactaagttttactgtttttgcggcacattttgatcatcaattgcgtgcggatagctcatatgaagtagaagttttgcaaaattattgtgctcaaaagaagatttgcctgtttaatggcaagtgggataaacatgatcagccccaaacgggaattgaggcagcggcgcgagaggcacgatatcattttttgactaatgttgctcatagcgagcgaatgaactatttattaactgcgcatcatggtgatgatttgctagaaaatattttgctcaaatttattcgctcgggaaatcctgaagagatgaatagtttgcaagatatcggctctatgcatggcgttgttttgcttagaccactattagcctatagtaagcaagaattactcgaatatgatcaagagcgtgaaattgactatgtaatagattcaactaatacggaggatgagactgttcgaaatcgactgcgtcatcatgtggtgccattattaaaagaggagaatcctaatttaattagtaatgcactgcgttttagtgaaaaaatgagtcaattgacggatttggcggatgagcagttgaatagtatgagaacggttgagccatttttgggtgcttggcgaattaaaacggacaacttaaatgatttatctacagaagaaaaaaatattttttggcaaaagataatctggcaaaaatatcatcgccgggtaaatgaaaatttgggcaattttgaggtgattgattatcaaggttatagttatttagttgaaaataagccacagaaaattgtgcagccatttagtatcgaactaaatcagcaatttgaattcaacggagcttattatttactaactactgataggcaagctgatttgaaagaaataggaagcttttggctggaaagggatgcacattttactgcgggaagtctagtacctgctagcaaattattgttgaaaaatggtcaacgagttaaggcgaaaaagaaatttgcagaaaaggcaattccctttgccttgcgctcttgctgcattacaatttatgctgaaaatgaacctgtttttgtagaaaaatgttatcaaaaacaggactttatcacagatggtaaacattatttcctatacatttattaagaagtcttcaaaataggtgaaaatgttagtggttgcaagctaatttgtgatagaattttaaacgtataacttaaagactttgcggaggttttttatgaagaataaccggaatcggctactttcaaacggccttttctatatagttgtgttccttctgctcctatggggaatcaactgggcactcggcggctctaacaatagtggtagctcagagaatatcagttactcacaatttgttaaagatttgcgtcaaggcaaagttaaaaactttagtgttcaacctgctaatggtgtttacactgtttcaggtagttacaagactgcacaaacaacaaagaatcaatcaaataatagttttgatttctttagtaataattcaagtagaaaagtttcgcgcttctctactaccatgttacagaatgattctaccgtttctaacgtgcaaaacttggcacaaaaaagtaatgctcggatgacaactcaaggagaatcacaatctggcaattggatttcgaccattgtcatgcttgtgccaaccgttttgtttatcgtcatgctttggatgatgatgaaccaaggtggcgctggacgtggtggtggcggcggaataatgaatttcggtcgttcacacgtcaagccagaagatccttctaagaataaggttcgtttctctgacgtagccggtgaagaagaagaaaaacaagaattagtcgaagtagttgaatttttgaaagatccatctaagtacactaagttgggtgcaagaatcccatctggtgttttacttgagggtcctcccggtactggtaagactttgcttgctcgtgctgtagctggtgaagctaacgtgccattttattcaatctcaggttcagacttcgttgaaatgtttgtcggtgttggtgctagtcgtgtacgtgacctgtttaacaatgccaagaaaaatgcaccaagtattatctttatcgatgaaattgatgccattggtcgtcgtcgtggcaatggcaccggcggtggtaatgatgaacgtgaacagactttgaaccaattattggttgaaatggatggttttgaaggcgatgaaggtgttattgtcattgctgctactaaccgttcagacgtcttagacccagctttgcttcgtcctggtcgttttgaccgtaaggtattggtaggtcgtcctgacgttcgtggtcgtgaagctattttaaaggttcacgctaagaacaagccgcttgcacctgatgttgatttgaaggaagttgcccgtcaaactcctggctttgtaggtgcagatttggctaacgtcttgaatgaagccgcattagttgctgctcgtcgtaatggtactgagattactgcatcagatattgatgaagccgaagaccgtgtgattgccggtccagctaagaaggatcgtttgatttctgaaaaagaaagaagacgtgttgctttccacgaagctggtcactcaatctgtggtttggtcttaagcgactcacgtactgtacgtaaagttactatcgtacctcgtggccgtgctggtggttataacatcatgttgcctaaagatgatcaattcattttgactaaaaagcaattatttgaacaaattgttggtttgatgggtggtcgtgcaggtgaagaagcaaccattggtgataagtcaactggtgcttctaacgactttgaacaagctactcaaattgcgcatagcatggtagttaactatggtatgaccgaatccttaggtatggttgagcttgaaaaggaaggcgaaagcaatccttacggctttaagccatatagtgaagcaacttcagctaaaattgatgaagctgtaaagaagattttggatgaagctcatgctaaggcccttgagatcgttaaggacaacaaagaaaagcatagaatcattgccgaagctttgctcaagtatgaaaccttgaatgaaaagcaaattatggccttgtataagactggtaagatgcctgaaaaagacgaagatgaatatccgagtgaatcaaaggcttcaacttatgaagaagctaaggctgctgcagagaagcgcgaagttgaaaaggcagaaaaaaaggattcagatcaagcattagctgatcaagaaaaagataccttggagactccatctgaaaagaatcatgaagttgaagaaaataatcctgagaatcccgaaaaggatcaatcagaaaatgaaacttcaactcaagatactcctgcagatgatgagcataaagacaattaaataaaagtagggcctgtcacaggctctatttttttagaaaagaaggataaaaatgagtgattatttagtaaagtcaattgataagactaaaaacttacgcttgttaaccattaccgctaagggtgtagtgagtgaagcacaaaagcggcatgacttgtggtcagcttcagctgctgtgcttggtcgtactttagtaggatctcttttacttgctggtgcagaattgacagataaggaagaattgacagtccgtttattaggcaatggccctgttggtccaaccatcgtgacagctacctccgatttgaaggtaaagggttatgttaagaatccacatattgctttaccacctaagaaaaatggtcatattgatgtgaaaaaggctgttggacaaggatggtttgaagtaactaaggaccttggcttgaaggaaccatacacaggtcaggtaccaattgtttctggtgaaattgctgaagattttgcttactatttgactaagtcagaacaaattccgtcagctgttggtttgtcagtatttgttaatccaaataattcaatcggtgaagctggtggctttatgttgcaagcacttcctggtgctagtgatgctttgatcgatgaaacgattaagcgaattgatgcattgccagcactctcaacttcatttttggatggaatgacaccagaagacttagcacgtaaaatcttaggaaccgattgtaagattcttgaaaaagatgatgtagcctttaactgtgattgttctaaagaaaagtatgctggtattttggaaactttgaagagcgatcaattgaaagcaatgattaatgaagatcatggtgccgaacttacttgcaatttctgcggtaacaagtatcattattcagaagatgaattgaaagatattttagctaaaaagaacaaagataaagattattaaggcaaataaagccctaaggttttaaccagcggggcttttttgatatcataatagggtaattttgaaaggatgatttggtgaataacagctggaaaattcgcgatatcaccattccaaaccgagttgttgttgcgccgatggcgggagtttcaaactctgcattccgcgttgtctgtaaggaattcggagcggggctggttgtctgcgaaatgatttctgatcatgggatcatttatggaaataaaaagacattaagtatgatggatgttgatccgcgtgaacacccaatgagcattcaaatctttggcggaagcgaggaaactttgcttcaagctgctcaatatattgatcaacataccgatgcggatattattgatattaatatgggttgtcctgtacctaaagtaacaaagactgatgcaggttcgaagtggctacttgattcaaacaagatttatcagatggttcacgcagtagtgcagaacgttaaaaagccggtttctgttaaaatgagaacaggctgggataaaaagcatatttttgctgtagaaaatgctttagctgctcaagaagcaggcgcaagcatgattgcgatgcatggtagaacacgtaaacaaatgtatcaaggtgaagctgactgggaagtattacatgatgttgcccaggtgctagatgtgccttttgtggctaatggtgatattagaacacccgaattagctaaaaaagcattggatgagatcggttgtactgcagtaatggttggtcgcgctgctttaggtaacccttggattttgaaagatatggtacactatctggaaactggtgaaaaattgaagccgcaaactgttcgtgagaaggttgaaacggctaaacatcagcttcacgcacttgttaaaattcacggtgaaaagcgtgctgtaccagaatttcgtcagcaagccgcgtattatttaaagggaattccccgttcagcccgtactcgtgctaaaataaatgaggtctggacgcgtcaagaagtatatgatttgcttgataattttgttgacgagtatgaaaaaagagaagaagctcgtgctgcacgacgcgcgacaatgaacaaataaatggaggaaaagtaaattggcaaagaatgaaatgaatgaccaattaatagttcgtcgccagaagatggaagaattacgtgaaaacggaattgaaccatttggtcaaagaaaatttgatcgtcaagatttggcaagtactttagaagaaaagtatggcaacgaagataaagaagaattaaacgctgatatgcctaagaccaagattgcaggtcgtatgcttgcaaagcgtggtaagggtaaggttggttttgctgatctttacgaccgtactggtaagattcaaatctatgtacgtaaggatattgttggcgaagataactacaagatctttaagaaatctgatattggtgatttcttaggtattgagggtgaagttatgaagactgatactggagagcttactattagagcccttcacgtaactttcttatcaaaggctcttcgtccattaccagataagtaccatggtttaaaggacgttgaggcaatttatcgtcaacgttaccttgatttgattaccaaccatgatagttacatgcgttttgttcaccgtacccaaatcattcaagctattcgtgactacttaaatggtcaaaacttcttggaggttgaaactccagtacttcacaacattcctggtggtgctgaagctcgtccatttattactcaccacaacgctttggatattaacctttacatgagaattgctttggaacttccacttaagcgtttgattgttggtgatatggaacgtgtttacgaaatcggccgtgtattcagaaacgaaggtttggacactcaccacaacccagaatttactgaacttgaaagttacgcagcatactgggactaccatgatgttatggatgaagctgaaggtattatccgtgctgcagctaaggttgtttcagatgacggtaagatcacttaccaaggtactgacattgacttaggcaagccattccgtcgcgttcacatggttgacttgatcaaggaaaagactggcgttgacttctggaagccaatgactcttgaagaagcaactaagattgcggaagaccacgacatccacgttgaaaagttctggaaagttggtcacattattaacgccttctttgaaaagtactgtgaagaaactattgttgacccaaccttcgtttacggtcacccagtagaaatctcaccacttgctaagaagaatgctgacgatccaagatttactgatcgtttcgaaatttacatcatgggtgaagaatacggtaacgccttctcagaattgaacgatcctgacgaccaacgtgaacgtttcgaagctcaaatggaagaacgtgaagcaggtaacgacgaagctgacatgatcgatgaagattaccttcgtgctatggaatacggtatgccacctacaggtggtttgggtatcggtattgaccgtttggtaatgcttttgactgatgctccagctattcgtgatgttcttttgttcccaacaatgcgtccagaacgtgttgaaagcgtagaagctgaagttaaggctgatatggaaaagaagaataaagaaaataagtaatcttataaattaaaaaactcttatctatgttttaagcatggataagagtttgtgtttatatattttttaattgagaatcattttttcatcagagtattttttaggatcatttaaatcccattgctgatatctaacttcttgacacttaaagcctaattttttgtaaagctttttggccttagtattttctgcaaatacatcaagactaactggtcgactcatgtatctcaaagctgtcgttgctaaagcatacccgatacctttattttgatgaattggatctacataaatgtaatccagttcttggggatgaactgcaacgaagcccaatatgctgtcagcatcataagctacataaattttgcaggagaaaaaatcatccttatatggagctgtctctaaaggtatgaagtatttttccgcaccaccaattgttagctcttctttacgactaacgtcgtgaatgcgacatacttcagcataatcgtttggttgatattctctgatattaaattttggcatgtttttctcgcttcctaatattaagattttgatttagaaagcaatagtacgtaatctcatgtgaaatctcctttaattaaattgaagatattatagcaatttttttaattcggtacaataactaaaattaacttagttaaaaacagataagtaatattttttcaaaaagtatttgcaaagagaataatctttgctataataatttttgtatcgcggaagtagttcagtggtagaacatcaccttgccatggtgggggtcgcgggttcgaatcccgtcttccgctccaagatgaagagctcacgaatgtgagctttttttgtgcctaaaataaatttatcttttttgataaaaaggtcttgcaaagaaaaatgtatttgctataataatatctgttgtcgcggaagtagttcagtggtagaacatcaccttgccatggtgggggtcgcgggttcgaatcccgtcttccgctccaagatgaagagctcacgaatgtgagctttttttgtgcctaaaataaatttatcttttttgataaaaaggtcttgcaaagaaaaatgtatttgctataataatatctgttgttgcggaagtagttcagtggtagaacatcaccttgccatggtggggggcgcgggttcgaatcccgtcttccgctccaagatagaaggctcaccaagtggtgagtctttttttacgggaaatagctcagtttggtagagcgctacgttcgggacgtagaggtcgccggttcaagtccgattttcccgatatacaagctatccgtttgggtagcttttttctttttgttataatatcttttaaaacttaaagggagattaaaaatgacggcaactactgaagaaaaatacaaattattagtggagcaagctagagctttgattgagggagaagatgattggattgctaatacagctaatttatctgctcttttgtttaattcgttaaatgatgtgaattttgcaggtgtttatcgctatgaaaatgatgaactgatattaggtccatttcaggggatgccagcatgtgttcatattcaaatgggaaaaggtgtttgtggtacggctgcacaagcaaaaacaacgcagattgttaaggatgtacatgaatttgctggtcacattgcttgtgatagtgcttcaaattcggaaatcgttgtcccaatttttaatcagggaaaactttggggcgtctttgattttgattcgaccaagctagctaattttgacgaaattgataaaaagtatttaactgaaatagcgaaagcaatttttgcgtaattattagaattggacataatgaagttgaagataagtcaaattgttttacttactgacaaaagaaaagtaaaataccataacgtattttaaagggtggtgtttgtatggaaaattcatatagtaagagcgttaatcaagtattgaaaattgcacgtgaacaagcacaaaattttcatcatcgcttgattggcacagaacatgttttattggctctagtaattgaaactgacggtgaagcaggaaaaatcttgcgttcatggggattaacaccaactgcagtacgtgaagaaattgaacgttatacaggttatggctctgcccctaaggcaagctacatggaaatgtcaccacgtttgagtttagctttggattatgctagaagacgagctaatgacgatggagttaaggaagttaacactaatcatgttttgctgggaattactgcaagtgagcaggttttatcagcaatgattttgaaaaacttgaatgttgatattcctcgtctgcagcaggatgttgaagacagtttgagtcaagaccaagactttggtgattcagctaattggctgggtgatgataacacgacgactggtcaaaagaagcgcaagagcactactcctaacttagataaggtagcggttaatttaaatcaacgtgtgcgtaatggcgagattgatccggtgattggccgtgaccaagaaattaagcgtgtgattcaaattttgtctcgacggactaagaataatcctgtcttagttggtgaaccaggagttggtaagactgctgttgctgaagcgattgcaactgagattgtcaacaaaaaagtgccacaggatatgcttaagaaacgggtaatggccttaaatttaggtagtttagttgctgggactaagtatcgtggtgagtttgaagacagaatgaagaaaatcctgaacgaagtcaccaaggatggcaatgtcattctctttgttgatgaaatgcatactttaattggtgctggtggtgctgaaggtgcaattgatgcttctaatatcttgaagccttcgcttgctcgtggcgatattcaaatgattggtgcaactacttttaatgaatatcaaaagtacattgaaaaagatcaagctttggcacgtcgttttcaacaagtgcgcttaagtgagccttcaagagatgacactttgacaattatgcgtggcttgaagtcgaaatatgaaaagttccatcatgtgactatttctgatgagagcttgaaggatgcagttgatttgtcaacgcgctatatttcggatcgctttttgccagataaggcgattgacttagtagatgaagctagtgccgcagttaagattcgtaataacattagcaatgatgctgagctagaaaaagttaatgagcaaattaagaaactgattacgcaaaagaatatggctgccgctagtcaaaactttgttaaagctgctcaattgcaggatgagcagaacaacttagaaatgcaacgtgaagcaatggtagagaagttagaagacaaagttagtgctaaagctgtggttgagccagaagatatcgctaaagtagtttccaactggactggcgtccctgttacccagatggaacgcaatgaatcacggcagctagctaacctggaaaagattttacaccaacgtgttattgggcaagataaggctgtttcagcagttgcccgtgctattcgtcgtagtagaagcgggattaaagatgaacgtcgtccgattggttccttcttgttcctaggtccaactggtgttggtaagacagaactagctaagtcagttgcagcagcaatgtttggctcggaagacaatttgattaggctagatatgtctgaatatatggaccaaattgcttcaagcaaattaattggctcggcaccaggctatgtcggttatgaagaaggcggtcaattatctgaaaaggttcgtcgtcatccgtactcggttattttgcttgacgaagtagaaaaagctcatccagatgtctttaacttgcttttgcaggttttagatgaaggatttttgactgactccaaaggtagaaaagtcgactttagaaatacaattataatcatgacttctaatttaggttctcgttcgctctttgataataaggcagtcggcttcaatgcagataatgcagatccagccaaggcgagatcagctaaagttgaacaagcaatcaaacaattcttccgcccagaatttttaaacagaatcgatgaaactattatcttcgatgaactagataagaagcagctgcgcaatattgtaactttgttaacgcacaagctggtagttcgtttgcaaaagaagggtatcgaattgaagctatcacgggcagcactggatcagattgcacaagatggttatgatccagaaaatggtgctcgaccattgagaagagcaattcaaaatgatattgaagacaagattgccgagatgctgattgtaggcgaagttaagtcaggcgacactttgaaaattggtagtcagcatggacatttaaaatttgaagtagttaatccgaaaaaagaaactgtaaaagtcaagtgatattggtgctataccttgacaaaatgctgaaaatatcatataatttttgctgatttaaaaagactgagattcaggattttgctgatctattgtccagcaaaatgataagggacaaaaacgacaattgttgtttttgtcttttttatgcctaaaattgcagttttttgaatttgtaacagaaatgtaatatttgctttcttagacagaaaggatgtttttccttgttaaatggacacgtagtgaactacggtaaacatcgaactagacgtagcttctcccgcattaaagaagtattgaagctgcctaacttaactgatgttcaaaccgaatcatataagtggtttcttgataaaggcattaaagaagtctttgacgacattatgccgattagcgatttctcaggtaagctttcattagaatatgttggctataaattgcaaaagccaaagtatacagttgatgaagcccgtaaccatgatgcaacttatgctgcaccaatgcacgttaccttgaaattgactaaccaagaaactggtgaaattaagactcaagatgttttctttggtgatttgccattaatgaccgaatcaggttcatttattgttaacggtgctgaaagagttatcgtttcacaattggtaagatcacctggtgtatattacactggcgattatgacaagaatggtcgtcaaatctttggtactactgttattcctaaccgtggtgcttggcttgaatatgaaaccgacgcaaagaacgtttcatttgttcgtgtagaccgtactcgtaaattgcctcttactgtattgattagagcaatgggtattggctctgacagtgacattattgatatgtttggtcaaagtgatactttgcaattcactttggacaaggatgttcataagaacccagctgactcacgtgtagctgaagccttaaaagatatctatgaaagacttcgtccaggtgaaccaaagactactgattcttcacgttcacttttgtatgcccgtttctttgatccacgtcgttacgatttagcacctgtaggtcgttacaagatcaataagaagctttcacttaagaaccgtttatacggtcaaactttagctgaaactttagctgatccagatactggggaaattgttgctaagaagggtactgtagttacccacgaagtaatggataagttagctccataccttgatcgtgatgactttaagatggtaacttaccaaccttcaaaggaaggcgtattaccagatcctattgcagttcaagaaattaaggtttactcaaaggtagaccctgaacgtgaagttaaattaatgtcaaatggtcatattgctgataacgttaagcatttgactccagctgatgttttagcttcaatcaattacttctttgcattgcaagatgaaattggtactactgatgatattgaccacttgggtaaccgtcgtattcgtcgtgttggtgaacttcttcaaaaccaatttagaattggtttggcacgtatggaacgtgttgttcgtgaaagaatgtcaatccaagatccttcaacagttactccacaacaattgatcaacattcgtccaattgttgcaagtattaaggaattctttggttcatcacaactttcacagtttatggatcaacataacccattaggtgaattgactcataaacgtcgtatgtcagccttagggcctggtggtttgacccgtgaccgtgctggttatgaagttcgtgacgttcactatactcactatggtcgtttgtgtcctatcgaaactccagaaggtcctaacattgggttgatcaactcacttgcttcatatgcgattattaataagtatggttttatcgaaaccccataccgtcgtgtttcttggaaggaccacaaggttactgataagatcgactatttgactgctgacgaagaagataattacattatcgctggtgccaacactccattgaatgatgatggttcatttaaggagaagttgatcttggctcgtcaaaaggaagataacgtcgaagtttctccagataagattgactacatggacgttattcctaagcaagttgtttctgtcgcttcagcatgtattccattccttgaaaacgatgactctaaccgtgctttgatgggtgccaaccagcaacgtcaggctgcaccattaattaatccgcatggttcacttgttggtactggtatggaataccgtgctgcacacgattcaggtgctgctttaatcgctaaggctgctggtgtagttgaatacgttgatgctaatgaaatccgtattagacgtgaagatggtactttggacaaatacacacttgaaaagtaccgtcgttcaaataactctaagtcatacaaccaaactcctaatgttaaattaggtgatcatgttgacaagagtgatgtaattgctaacggtccaactatggatcatggcgaacttgctttaggtcaaaacccattgattgccttcatgacttggaacatgtacaactatgaagatgccatcatgctttctgaacgattagttaaggatgatgtttatacttcaatcagtattgaagattatgaatcagaagctcgtgacactaagttaggtccagaagaaattactagagaacttcctaatattggtgaggatgctttgaaggatcttgatgctgatggtatcgttcgtgttggtgcagaagtccacgatggcgacattttggtaggtaaggtaactcctaagggtgtaactgaattatctgctgaagaaagattacttcacgctattttcggtgaaaaagctcgtgaagttcgtgatacttcacttcgtgtaccacacggtggtggcggtattgttcaagacgttaaggtttatactcgtgaagccggcgatgaactttcaccaggtgttaacacaatggttcgtgtttacatcgctcaaaagagaaagattcaagttggggacaagatgtctggtcgtcacggtaacaagggtactgttgctgcagttgttccagaagaagacatgccatacttaccagatggtactccagtagatatttgtttaaacccaatgggtgttccatcacgtatgaacatcggacagcttcttgaattgcacttaggtgcagctgctcgtcaattgggcattcacgttgcaacaccagtatttgatggtgctgacgaaaatgacgtttgggacacagttcgtcaagcaggtgttgataaagatggtaagaccgttgtttatgatggtcgtaccggtgaaccattccacaaccgtgtatctgtaggtgttatgcactacttgaagttgacccacatggttgacgacaagatccacgcacgttcaattgggccttactcattggttactcaacaaccacttggtggtaaagcacaatttggtggtcagcgttttggtgaaatggaagtttgggcccttgaagcttatggtgctgcttacacattgcaagagattttgacttacaagtcagatgacgttgttggtcgtgtaaaggcatatgaagctattgttaagggtgaaaagattcctaagccaggtgttccagaatcattccgtgttcttgttaaggaacttcaatcattaggtttggatatccgtgttcttgatatgaaccataatgaaattgaacttcgtgatatggatgaagactcaagtgaacacttgaacatcgatactttgtcacggatggcagaagagcaagaaaagaagaagttagccgaagaaactggaaaatcagaagataaagacagtaaagaaaatgcagataagccggtagctcctgcagatgagtctgacgataaagtttctaaatagtaggaggttaaacttttgatcgacgtaaataagtttgaaagtatgcaaattggtcttgcatcacctaacaagatcagaagctggtcatatggtgaagttaaaaagccggagaccatcaactaccgtactttaaagcctgaaaaagatggcttatttgatgagagaatttttggaccaacaaaagattggtcatgtgcttgtggtaagtacaagggcgttagataccgtggtatcgtttgtgaccgttgtggtgttgaagttacttcttcaaaggtaagaagagaacgtatgggtcatattgaattggctgcacctgtaactcacatttggtactttaagggtatcccatcaagaatgggattagttttggacatttctccaagattacttgaagaagttatttactttgctgcatacattgtaattgatccaggtgatactgaccttgaacctaagcaattattaactgaagctgaataccgtgaacaaaaagctaagtacggtaaccgttttgaagctaagatgggtgctgaagctgttcgcgaattgcttaagaaagttgaccttgataaagaagttaaggatttgaagaaagaacttcaaactgccactggtcaaaaacgtacgcgtgcaattagacggttagatatcttggatgccttcaagaattcaggtaacaagcctgaatggatggtaatggatgccgttccagtaattccaccagatcttcgtccaatggttcaacttgaaggtggccgttttgcaacttcagatttgaacgatttgtacagacgtgtaatcaaccgtaacaaccgtttgaagagattgcttgatttgaacgcacctaatattattgttcaaaacgaaaagcgtatgcttcaagaagctgttgatgctttaattgataacggtcgtcgtggtcgtccagttgttggaccaggtaaccgtccattgaagtcactttcacatatgcttaaggggaagcaaggacgtttccgtcaaaacttgcttggtaagcgtgttgactactctggtcgttcagttatcgatgtttcaccaaaattgaagttctatcaatgtggtgtgccacgtccaatggctttggaattgttcaagccatttgtaatgcatgaattagttaaacgtggaattgcatcaaacatcaagaatgctaagcgtaagattgaccgtgaagatgacgatatctgggatgtacttgaagatgtgattaaggaacgtccagttcttttaaaccgtgcacctactcttcaccgtttgagtattcaagcctttgagccaatcttggtaccaggtaagtcaattagacttcacccattagcttgtgaagcctacaatgccgacttcgatggtgaccagatggctattcacgtaccactttctgatgaagctgttgctgaatcaagattgttaatgttggctgctcaccacattttggctcctaaggatggtaagccaattgttactccatcacaggatatcgttttgggtaactactggttaactcaggccgaacgtggtcgtgaaggtgaaggtatgatcttcagctcaccagcagaagctgctgtagcttacgaaaatggcgatattcactaccataccattattggtatgtctgcagatgctatgcctaaaaagccatggcctaagggacatgaacacggcatctttattaccacttatggtaagattgtcttcaatcaattgttcccagatgattacttctatatcaatgaaccaactgaagagaacttgaacaatccgttggatgctaagtacttcttaggtgaaggcgaagagattgataagaagatcgatgaagtaggcgatgatttaatcgctagtccatttaagggaagcttcttgtcagattctattgctactatttacaagtattacaaggttcaaagaacttcagaatacttggatgatttgaagaagttaggctacactagctcaactacttcaggtattactattggtatgactgacgttccagaaatccaagataaggatgaaaaggtagccaaggcacgtaaacaagttgatgttgtttctaagcaatttagacgtggtttgattactgaacaagaacgtcacgaccgagtaattagtatttggaatgcatgtaaggacaagatccaaaacgaaattgcacaaattcacgcacctcgtaatccaatttcaatcatggcagactcaggtgcccgtggtaacatttctaactttactcagttagccggtatgcgtggtttgatggccactcctaacggtggtttgttcgaaattcctgttacttcaaactttaaggaaggtttgtcagtattggaattgttcatgtccactcacggtgctcgtaagggtatgactgatactgcattgaagactgctcagtcaggttacttgactcgtcgtttggttgatgttgctcaggacgttattattcgtgatgacgattgtggtactgatcgtggtattacagttagtgccatcatggaaggtgacgaaatgatcgaaccattatttgaccgtttggttggtcgtttcactgctgagactgttaaagatcctgaaactggcgaaactattgtcggcagagatgtcatgatggatgaaaacatggcacacaagatttgtgatgcaggtgtaactcacgttaagattcgttcaattcttacctgtgatactcctcacggcgtatgtcgcaagtgttacggtatgaaccttgctactggtgaagaagttgaagttggtgaagcagttggtactgttgctgctcaatcaattggtgaaccaggtactcagcttactttgagaactttccacaacggtggtgttgccggtgctgaagatatcactcaaggtttgcctcgtgtgcaagaattgtttgaagcacgtaaccctaagggtcgtgcaaccatttctgaagttgatggtgtaattgattcaattcaagaaaacccagcagaacatactcgtgaaattactgttaagggtaagattgatactagaagctacagtgttccttatacagcttcagttgctgttagcgaaggtgactacgttcatcgtggtgacaagttaactcttggttctgttgatcctaaggaattgattcaagttactgatacattaactactgaaaagtacatcttagttgaagttcaaaaggcttatagaatgcagggtgtagacattgccgacaagcacgttgaagtgttaactcgtcaaatgctgcaaaaggttcgtgtccttgatccaggtgaaactgacatcttgccaggtgaagttatggatattggtcaatttagagaccgcaacaaggaagttattatttctggtggtattccagcaactgctcaaagcgttatcttgggtattactaaggctgctttggaaactaacagtttcttgtcagctgcttcattccaggaaaccacacgtgttcttactgatgcatctattagaggtaagaatgatccacttcttggacttaaggaaaacgttattatcggtaaaattattccagctggtactggtatgcctgtataccgcagcatggaacctgaagctgacgttaagaagccagattcagtatactcaattgctgatattgaaaagcaaatgaaagaaaaggataaagctaagcaagactaagctttattgaaaataaataagcatttccaatcttttaagagcgggaatgcttatttttttgtctaaaaaattaattgggttagtactaatcctaggaaaatatatggaataaatggatagcgatggttaataggagttttttcaataagaaaaattgcaattaccaagattgaagcaaatagaaaaactaaattggcaaatgatggggtgaagtagcaagcgataattaagtaaattaataaatcgcctagccccatttttctttgcattatgctatagctaaaaattcctagcaataatgtaaaagagatccagtcgattaatgtaaaagctgcaaattggttgaataaaatcgcaacgctaatggctggaattagtaggagaagatcaaattcttgcttttgataatcagagattgcaacgactaaaagcgaaaaaagcaaaatagcggtaataatgtcctgtgtcttactaaaatcgagtaaacaaaaggcaaagccgccaattaattcaaataaaaataattcaactggaatttgttgataacaataacgacattttccttgaagaaaaagataagataataatggaatttcatccaaaattgataattcaaggtgacagttgttgcactgagaacgtgagtaaataaaatttttatcattccagtgctcgtaaactactgctgcgtgagaagccaagcaacttccaattataaagttagtaaaaataaataagtatttcaaaaaaacacctccactatttattacgcaaaaatagccgatttttctttttttattttgaaaaagtttgctttctgcttaaaaccgagtacaatagtctttgtatgttttgaacagtctattcgtgagtaaaaaagaaactcccggatgtgtgaacaaaatagtattttaggaggaaaaattaatgccaaccattaatcaattggtaagaaaaggccgtcattcaaaggtcactaagtcaaagtcacctgctttgaattacagctacaacagtatgaagaaggaatcagtattcaacccagctccacaaatgcgtggtgttgcaactcgtgttggtactatgactccaaagaagcctaactcagctttacgtaagtacgctcgtgttcgtctttcaaacttgatcgaagttactgcttacattccaggtgaaggccacaacttgcaagaacactcagttgtattaatccgtggtggtcgtgtaaaggaccttcctggtgtacgttatcacatcgttcgtggtgcccttgatactgctggtgttgatggcagaaagcaaagccgttctaagtacggtactaagaaagattaaaggaggagttaaataatgcctagaaaaggtcacgtaactaagagagacgttttagcagatccagtttacaactcaaagcttgttactaagttgatcaaccacttaatggtcgatggtaagagagctaaggcatcttcaatcctttacgatgctttcaacattgttcaagacaagactggtaaggaaccacttgatgtatttgaagaagctatgaacaacgttatgccagttttggaagttagagctcgtcgtatcggtggttcaaactaccaaatcccagttgaagtacgtcctgaaagaagaactactttaggtttaagatggcttgtttcatacgctcgtttacgtaacgaacacactatggatgaacgtttagctaacgaaattatcgatgcttcaaacaacactggttcagcagttaagaagcgtgaagatgttcaccgtatggctgaagctaaccgtgcatttgcacactaccgcttctaatttgttcgttttaatttaaggagagaataatttatggctaacaagcgtgaatttccattagcaaagacacgtaacatcggtattatggcccacatcgatgcgggtaagactactactactgaacgtatcctttactacactggtaagatccacaaaattggtgaaactcacgaaggtgattcacaaatggactggatggatgaagaaaaggaacgtggtatcaccattacttctgcagctactactgcacaatggaaagaccacagaattaacatcatcgacaccccaggacacgttgacttcactatcgaagtagaacgttcacttcgtgttcttgatggtgccgtaactgttcttgatgcccaagctggtgttgaaccacaaactgaaaacgtatggcgtcaagctgaaacttacggtgttcctcgtattgttttcgttaacaagatggataagatcggtgctgacttcgataagtcagttaagtcattgcacgaacgtttaaacgctaatgcccatgctgttcaaatgccaattggttcagctgacacttttgaaggtgttatcgacttaatcaacatggttgccgacatctacgacgaagataagcttggttctaagtgggatactgttccagttcctgacgaatacaaggaagaagctgaagcacgtcgtaacgacttaattgaagccgtagccgatgttgatgacggcatcatggaaaaattccttggcggtgaagaaatttctaacgatgaattaaaggcagctatccgtaaagctactttggacttgaagttcttcccagtttacgctggctcagccttcaagaacaagggtgttcaaatgatgcttgacggtgttattgactacttgccatcaccacttgacgttaagccttacgttgctcacaatcctaagactggtgatgaagttgaacttatggctgacgataagaagccatttgcagctcttgcatttaagattgctactgacccattcgtaggtcgtttgactttcatccgtgtttacaccggttctcttgaatcaggttcatacgtattgaacgcttcaaagaattcacgtgaacgtgtaggtcgtttgcttcaaatgcacgctaactcacgtactgaaattccagaagtattctcaggtgacatcgctggtgctatcggtttgaagaacaccactactggtgactcattaactgacccagatcacccacttattttggaaagcttgaaagttccagatccagttatccaagtatcagttgaacctaagtcaaaggctgaccgtgataagatggacgttgctttgcaaaagcttactgaagaagacccaactttccgtgctgaaactaacccagaaactggtcaaaccttgatttcaggtatgggtgaacttcaccttgacatcatggttgaacgtatgagacgtgaatttaacgttgatgctaagattggtgaaccacaagttgcttaccgtgaaaccttcaccaaggaagctaaggcacaaggtaagtttgttcgtcaatcaggtggtaaaggtcaatacggtgacgtttggattgactttactcctaacgaagaaggtaagggttacgaattcgaagatgccatcgttggtggtgttgttcctcgtgaattcattccttcagttgaccaaggtttacaagaagctatgaagaatggtgttcttgcaggttacccattgatcgacgttaaggctaagctttacgatggtagttatcacgaagtcgactcatcagaagctgccttcaaggttgctgcttcacttgctttgaagaatgctgcttcaaaggctggcgcagttatcttggaaccaattatgaaggttcaagtaactactccagaagaatacttaggtgatgttatgggttcaatcactgctcgtcgtggtaccatggaaggtatggaagacagagccggtgctaagatcatcaactcatttgttccactttcagaaatgtttggttacgcaactactttgcgttcatcaactcaaggtcgtggtacatttactatggtatttgatcactactcaccaacacctaaatcaattcaagctgacatcattaagaagcgcggcggagatgctgaatagcttccgttaagaactgattaatgcagttagcttaattgaaaacaatttcatataaaaaagagttatcatttttattcaatgtcattaagttaagacattgacaattaatattagacttttaaagcactgatttaacatttaattggttaaattggtgcttttttcgtacaacaaataaggcatagcacagattctgcttttttaagctacgcgatataaataatatacagctgatttgggcttaatatttctcttgtccttgcggcctggtctaattggaatggtataatagctgatctgaataaggatccgttcaaaatcttgcgttaaagaagaagccaaatacatgctctgaataatcaagcatgattgcttgaaattgatggcatattgatacttgcaatgcttttgcggaatataggcctgtgcatcaatttgactgattgcattaaacataatcatatgggcataaatttccatttcaataaatttatcttgtttggaatggaactgtacactgcctaaagaatacttcaatttcttgaaggaggtctcaataccccaacgcagatgataaagctctttaattctttttagcggataattttttcgatcaagattggttagcacaacttcccattcttctttgcctgatttggcatcattaattctaaatttgcaggctcgaaattttattgtgcataactcgccaaaatcccagcttagatcctgggtatttttagagcgatacttaatatattggcgataatgatgctggacatggtgaatattctcactggctttatgcgtgatgtagtaatagttagaagtagttaccaggcaggaaatctcacgatcacattcttgatcaggcaatgtcgttatttctttaactccgccttgtccagccttagttcgtattatgtaatgacagttaggcaggcgattgcagttttcaatcatattgaaactagtgtagccacgatccattgttacaatatatggaccacaattcaaagctttaagcatttgaacagccgctttgcgttcatccatttctgatttaggctgaaaaatacaatcctggtaggtattattcaatagatcatataaggcattaacgtgaatttgacaatagggtttctttttatgagaagaagcttgtacaatgttattcgatttcggattccagatttgattaaagtcagagccatcaatggcaaacaaacggtagtgatgatcaaaaagttgaatattaaatagattttgattaaaaacagtcagaatatgtttaaaacaagcaggagaaagctggcttttgcgttgaacataggcagaagtactaactactttatcgttctttttagttgcatcttcgccaaaagctctaaagagttcactgtttaaattctgaccttgcatgttaattgtagttttaaggactgtcgctgcatctaaagtgcgtttcctggtaaaagcatgaggattattaataaaatcgtgaatatgatccccagtattattgataatttgatcaagacgttctagaatattcttatgaagggctttcataattaacaccatctttctggcaataattttgaaggtttaaaatatataatatataagataggcgaaaaggctggtcttttcgcctttattttatacaaaaaaagagatcgaatccaaatgattcgatctctaaaaaagcacccttaattgtcaatgtcttaacttaatgacattgcatttttattttgataactctttttttgtaaataaatttaagaaaaaagtcgtaaacccttgatatttaaggagggacaaagtacaatagtttttgtgcttatgggacagtgtgcccttaagtgtgaaaatcgttgtaaagcgttgacgcaaaaggttgcggcacgccaggctgcattgccacagtggcgtgcggggaatttttgccgagcgagtcatcttttaaagaagacgttaaggaggtaatttaatggcaagtcaaacaattcgtattagacttaagtcttacgaacatggtattctcgatgaatcagctgctaagatcgtagctactgcaaagagaactggtgctgaaatttcaggtccagttcctcttccaacagaaagaactttattcacagttcttcgttcaccacacaagaacaaggactcacgtgaacaattcgaaatgcgcactcacaagcgtttaatcgatattttgaatccaacaccaaagactgttgattcattaatgaagcttgatcttccaagcggtgtagacatcgaaattaaactgtaatttaaatagaaagaggtgtaaacatgaccaaaggaatcttaggaagaaaagttggtatgactcaaatctttactaaagatggtgtccttgttcctgtaactgttgttgaagcaactcctaacgttgttatgcaagttaagactgttgaatcagacggttacgaagcagttcaattaggttaccaagacaagcgtgaagttttgagcaacaaaccagaaaaaggtcatgctgataaagcaaagacttcgcctaagcgcttcattcgggaaatccgcggtgttgagcttaaggactatgaagttggctcagaagttactgtggatacatttaaggaaggtgacgttgtaaacgttactggtacttcaagaggtcatggataccaaggtaacatcaagcgttggggccaatcaagaggaccagaaactcacggttcaagataccacagaattcctggttcaatgggttccatcattaaccgtgtaccaaagggcaagcgcttgccaggtcacatgggtgtgaagaaagttaccattgaaaacttagtaattgaaaaagttgttgcagacaagaacgtattgatgattaagggtaacgtcccaggtgctaagaactcattaatcgttgttaagactgcttctaaagctgtaaaggctgataaataggaaggaggactagaatggctaatttaaaagttatggatcaaaacggtaaagactctggtgaagttactttaaacgataaggtttttggtattgaaccaaatgaaagtgtcgtttttgaagcaattattagacaaagagccggcaagcgtcaaggtacctcaaaggttaagaatagatctgctgttcgcggcggtggtaagaagccttggagacaaaagggtactggtcgtgctcgtcaaggttctatcagagctccacaatggcgcggtggtggtacagtctttggcccaactccacgttcatacgcatacactatgccaagaaagcaacgtcgtttggctattaagtcagttctttcccaaaagttgattgacaatgatttaattgttttagataagttgactatgtcagctcctaagactaaggaattagtatcaatgttaaacggcttaaatgctgacggtaaagttttaattgtttcagatgataacaatgtacaactttccgcaagaaacttgactaaggttaaggttgttccagttaatggcttaaacgttgaagatgctgttaactatggcaagttgatcttagatcaagatgctgttaagaagatcgaggaggttttggcttaatggacgcacgcgatatcattttaagacctgtcattactgaaaagtccacgaacttaatggatgataagaagtacacattcgacgtgcttttaactgcaaccaagacacaagttcgcaatgctgttgaagaaatcttcgatgttaaagttaagaacgtaaacattatgaacgttcgcggcaaggacaagcgagtaggtcgttacactggtaagaccgctcgtcgtagaaaggctatcgttactttaactaacgattcaaacgacatcaagattttccaagacgataacacagaagacaacaagtaataggaggtcagtcaattggctattaagatttacaagccaaccacgaatggtcgtcgtcatatgacttcttccgactttgctgagatcactaagacaaagcctgaaaagactttacttgaatctcaatcacatactgcaggtcgtaactcatatggtcatatcactgtaagacaccgtggtggtggtcacaaacaaaaataccgtatcatcgactttaagcgtaacaaggacaacgcaaaggcagttgtaaaggctatcgaatacgatccaaacagaactgctaacattgctttgcttcactacactgatggtatcaaagcttacatcttagctcctaagggcttaaaagttggcgatgtagttgaatcaggtgattcagttgacattaagccaggtaacgctttggaattaaagaatatcccaactggtacttcaattcacaatatcgaattaatgccaggcaagggtggccaactcgtaagaagtgctggtgcttcagctcaagttttaggtgctgatggtgattacactttagtaagattacaaagtggtgaagttcgtaagattttgtcatcatgccgtgcaactatcggtactgttggtaatgaacaacactcattgattcaattaggtaaagctggtcgtaagcgttggttaggcaagcgtccacaatcacgtggttctgtaatgaaccctaacgatcacccacatggtggtggtgaaggtaaggctccagttggtcgtcctcaacctatgactccatggggtaagaaggcacgtggtattaagactagagataccaagaaggccagcgagaagttaatcattcgtcaccgtaaaggtagcaagtagtagaaggagggttaattaatgagccgtagtattaaaaaaggtccttttgctgatgcatcattgttaaagaaggttgatgcacaagcagatgcagataagaagcaagttattaagacttggtcacgtcgttcaactattttcccttcctttgtaggtttgactatagctgtttacgatggtagaaagcatgtcccagtatatgtaactgaagacatggttggtcataagttaggtgaatttgttccaacaagaactttccacggacacaaatccactgatgataaagccacaacacaagcttagaggaaggagaaacatctaaatggcagaacaaattagttcagctaaggctgaagcaagaactgttcgcatcgctccaagaaaagctcgtttagtcgttgacttaattcgtggcaagagcgttgctgaagcattagcaatcttggaatttacgcctagagctgcttccccaatcgttgaaaaagttttacgttcagctattgctaacgcagaacataactacgatcttgaaagtgcaaacctttacgtatcagaagcttacgtaaatgaaggtgcaactttgaagagattccgcccacgtgctaagggtatggcttctccaattaacaagagaaccagtcacgtagttgtagtagtttcagaaaagaacgattaagggaggtatattaatgggtcaaaagattaacccaaacggttttcgtctcggtgttatccgtgattgggaatcaaaatggtatgctgacaagggatacaaagaaactttaaatgaagaccttcaaatcagaaaatttatttcagaaaagttgaaggatgcctcagtatctactgttgaaattgaacgtgcagctaacagaattaacatttcaattcatactgctaagccaggtatggtaattggtaaaggtggttctgaagttgaagctttgagaaaacaattaaatgctttaactggtaagcaagttcacattaatattgttgaaattaagaaaccagatcttgatgctaagttagtagcagatagtattgctcgtcaacttgaagctcgtattgctttcagacgtgctatgcgtcaagctactcaaagagctatgtgtgctggtgccaagggtattaaggttcaaacttcaggtcgtttgaacggtgccgatatggcaagaagagaatggcacacagaaggtcgtgttccattacaaactttgagagctgatattgattacgcttgggtaaatgccttcactacttatggtgaaattggtgttcaagtttggatcaaccgtggcgaaatcttacctactcgtaagaataagccagcttcaaagccagcgaagggaggaaatagataatgcctttagtaccaaagcgagtaaaacaccgtcgtgaattccgtggtaagatgcgtggtgctgctaagggtggtaaatatattgcctttggtgaatatggtcttgaagccctcgaatcacattggattactaaccgtcaaatcgaagcagctcgtgttgctatgactcgttacatgaaacgtggcggtaaggtttggatcagaattttccctcaaaagtcatacactgctaaaggtgttggtgtacgtatgggttcaggtaaaggtgcaccagcaggttgggtagctgtagttaagagagaaaagattatgttcgaaattggtggtgttgatgaagcaactgctcgtgaagctttacgtcttgcttcaactaagttaccaattaagactaagtttgtaactagaagttcggaagtaggtggcgaatctaatgaaggctaaagatatcagagcattaaccactgatgaaatgttagaaaaagaaaagcaatacaaagaagaactcttcaatttgcgtttccaacaagcaacgggtcaattagaaaataccgctcgcttgagcaaagtccgcaagaatatcgccagaatcaagactattctgagcgaaaaagcgttagaaaacaattaatggaagggagctattaacttgagcgaaacaaacgaaagaaatcgtcgtcacgtataccaaggtcgtgtagtttctgataagatggacaagactatcgttgtagttgttgacacttacaagaaccaccctgtttacaacaagcgtattagatattcaaagaagtactacgcacaagacgaaaataacgaagctaaagttggcgatactgtacgtatcatggaaacccgtccattatctcgtaagaagcgcttccgtttagtaaagattgttaagaaatctgtttaatttgcggatttagtgaggggaggattacacagtgattcaaaacgaatcccgtttaaaggttgctgataactctggtgccagagaacttttagttattagagtcttaggtggttcaaagcgtaagaccggtaacattggtgacatcgtagtatgtactgttaaacaagcaacaccaggtggcgttgtcaaaaaaggcgacgttgtaaaagctgttattgttagaactaaatcaggtgcacgtcgtgaagatggttcatacatcaagttcgacgaaaatgctggcgtaattatcaacgcagacaagagcccacgtggtactcgtatctttgggccagttgcacgtgagttacgtgagaacgactttatgaagatcgtctctcttgctcctgaagtcttataattgatagtgaggtgcactgatgttcgttaaaactggtgacaaagtaaaagttattgccggaaaagataaaggtaaagaaggtactgttctttctgttaacgttaagaaaaaccgtgtagtggttaagggcgttaacaagattaagaagcaccaaaagccttcacaaagcaatgctaatggtggtgtagttgaatcagaaggttcaattcacgcatcaaacgttaaagtaattagtagtaaaaaagaagataagtagaagggaggacacacatggcaagttatttagctaaggaatacaacgaaaaggtagctcctgcattagaagaaaagtttaactacaagtcatctatgcaagtacctaagatcgacaagattgttttaaacatgggtgttggtgatgcagtttctaacgccaagaacttagatgaagcagttgaagaattaactttgatctcaggtcaaaagccattaatcactaaggccaagaaatcaatcgctaacttccgtttacgtgaaggtatgtctatcggtgctaaggtaactcttagaggcgacagaatgtacgatttcttgtacaagttaatcaatgtttctcttccacgtgttcgtgacttccgtggtgtatcaactcgttcatttgatggtcgtggtaactacactttaggtattaaagaacaattgattttcccagaaatcgattttgataaggtaaaccgcactagaggtttagatattgttatcgtaactactgccaacactgatgaagaagctcgtgaacttttgactcaatttggtatgccgtttgcaagatagtggaggacattaatggctaaaacatcacaaaaaatcagaaatcgtcgtcctgctaagttctcttcacgcgaatatacacgttgcgagagatgtggtcgtccacactccgtataccgtaaattcggattatgccgtatttgcttaaaggaattagcacacaagggtcaaatccctggtcttaaaaaggctagttggtagtatacggttaggaggatagcttaaatggtcatgacagatccaatcgcagattacttgactagaatcagaaatgccaacatggcaaaacacgattcagttgaaattcctgcatcaaacattaaaaagtctatttcagaaattttgaaacgtgaaggcttcatccgtgattacgaagttgcagatgataacaagcaaggcgttatcaaggtattcttgaaatatggtccaaatggagaacgtgttatctcaggtttgaagcgtatttctaagccaagtcttagaaactacgttggcgctgaagacttacctaaagttcttaatggcttaggcattgccatcgtttctacttctgctggtgttattaccgacaaggaagcaagacaaaagaacgttggcggcgaagtaattgcctacatttggtaatactgacagaaaggagaacaatcaatgagccgaatcggtttaaagactattgaagtccctgacagtgtcactgttaccaaggaaggcgacaatattactgttaagggcccaaagggtgaattaactagatacttcgatccaaagattaagtttgaacaaaaagatggtgaaattaacttttcacgttcaagcgaaagcgacaaagcacttcacggtactgaaagagctaacttagcttcaatgatcgaaggtgtagttgacggttataagaagactttgaagttaatcggtgttggttaccgtgcacaagcacaaggcaacaagattactttaaatgttggttattcacacccagttgtattgactgcaccagaaggtgtttctgtaaaggcaacttcagcaactgatgtagaagttgaaggtgtttcaaagcaagatgttggtcaatttgcagctgaaatccgtgccgtacgtccaccagaaccttataagggtaaaggtattcgttatgttgatgaatacgtacgtcgcaaggaaggtaagactggtaagtaataagtagttatttttgaggtgaaattgtgatttctaaaccagataaaaacaagttacgcttaaagcgtcatagacgtattcgtggaaaaatttctggtactgctgagcgcccacgcttaagcatttttcgttcaaataaaaacatctacgctcaattaattgatgacgtagcgggtgttacgcttgcaagcgcctcaactttggatgaaaatgtatcagatgcaactaaagtagaacaagctgctgctgtaggtaaggcaattgctgaagctgcaaaggcaaaaaacatttctactgttgtattcgacagaagtggttacttataccacggccgtgttcaagcattagctgatgctgctcgtgaaaacggattagatttctaggaaaggagaattaacacatggcaaaccgcaatgattctcgtaacaatcgcagaaacaaagacgatatcgaagatcaattagtcgctgtcaaccgtattactaaggttgttaaaggtggccgtcgcatgagatttgctgctcttgttgttgttggcgacaagaaaggccgtgtaggttttggtactggtaaagctcaagaagtcccagaagcaatccgtaaggctgtagaagacggtaagaagaaaatgatcaatgtacctaaagttggtactactattcctcatgaagttattggtcactacggttcaggtaacattttattgaaacctgctgaagctggttctggtgttgctgctggtggtgccgtacgtatcgttatggatatggctggtatctcagacgtaacttcaaagtcacttggttcaaacactccaattaacgttgttcgtgcaactatcgatggtttgaagaagcttagaactagtgaagaagttgcaaaacttcgtcaacctgaaagagcttaagattagggagatcatagatgactgatttaaagattactttaattagaagtgttgctcaccgtctacctcaacaaagaaagatcgttaaagctcttggtttaggtagagtggatagtactgttgttcttccagacaacgctgctactcgtggtgcattattaaagattgctcacttaatctctgttgaagagattaacaaatagaatatcaaggaggtgccaaattaatgaagcttcatgaattacattctgctgaaggctcacgtcgcaatagaaaacgtgttggtcgtggtacttcaagtggttacggtaaaacttcaggccgtggtcaaaagggtcaattagctcgtcaaggcggtcatactcgtttaggttttgaaggtggtcaaatgccattattcagaactatgcctaagcgtggttttaagaacattaaccgcaaggaatatgcaattgtaaacttagatgatttaaacaagttcgaagacggcagtgaagtaactgtagaatcacttaaagataatggcttagtaaagaaagaattgtcaggtgttaagttacttggcaagggcgaattaaaagttaagttaactgtaaaggttaataaagtttccgcatctgctaagcaagcagttgaagccgctggcggaactgttgaggtgatctaatgttttcgaccttgaagaacgccttcaaagataaagaaattagaaataagctctatttcacgctctttattcttttgctgtatcggatcagcgcaaacattaccgttcccggtgttaatgcgaaggcgatcacgcaggttgcgcaaactggtttagttccaatgctggatactgtatctggtggtggactagataactattcaatattttctttgggtgtttctccttatattacggctcagattgttatccagctgctacagatggatattgttcctacgttagtagaatggggaaaacaaggtgaagtaggtcgacgtaaaacaaatcaagtaactagatatttagcattagttgttgcttttatccagagtattggtattacgttaggctttaacgctttaactcaaatgggtttggtaaagaatcaaacaccacagacttatatagaaattgctattattatgactgctggaactatgttattaacatggttgggtgatgaaatcactgataagggtctaggtaatggtatctcagtaattatttttgctggtattattgcaagactaccaagtggtctatggcaaatttataaggaagaaattattaataatagtgctagtgatcgttggcaaggcattttgttcttcatcgcggttatagttgcaatccttatcgtaactcaatttgttacatgggttgaacaagctgatcgtcgtattccaattcaatatacgagaagagcgacgatgagtggttctgaaagttttctaccattaaaggttaatgtatctggagttattccggttatttttgccagttcatttattgttacaccggcaacgattttaatggcctttcaaagaacccagggcgatcaacaatggtttaaagtaatgaaccaaatctttagcttacaaactactcctggggtaattatctacactcttttaattatcttatttacattcttctacgctttcgtacaggtcaaccctgagaagctagcagaaaacttacaaaagcagggtgcttatattcctagtgtatggccaggaaaagatactcaggattatatttcaaagatgttgatgaaattatcaacagtaggttcattattcttgggcttagttgctttactgcctcaattggctactaacttttggaatctcccaagttccattggtttaggaggaacaagtcttttaattgtgattggggttgttctcgagttatctcgtcaaattaacggcttgttaatgaagagagaatatgttggattcatcagataggaacggataaatgattaacttaattcttttagggttaccaggtgctggtaaaggtacagcatcagagcgaatcgttgataaatatcacttaactcatatttcaactggggatatgtttagggaagcaatggctaacaagacgaaggttggtcttgaagctaagagttatatcgataagggtaatctagtacccgatgaagttaccgcaaagttggttgaggaacgtttaagtcaacctgatattaaagaaggttttatcttagatggttttccaagaaccactgtacaagcagaacttttagatggtattacaaaacgtttggagaaacctttaacaaatgtcattgcgcttgaagttgacgaagacactttgattaagcgtttatcagcaagatacatgtgtaaaaattgtggaactacttacaacaagctttccaagcagccaaaagttgagggcacttgtgatcgctgtggtggccatgaattttatcaacgtgaagatgataaaccagaagttgttaagaatcgtcttgaagttaatgaaaagatgaatgcacctttgaaggacttttatcagaagaaaggcttgctcactgtaattaatggtgaacaaactccagaaaaagtctttgaagatattgatgcggtattgagtaataatcaatagaagaaaaatttgtataattttttatccgtgttataatttcaaagtatatgactgtttaattgcggaggaacaactttggcaaaagatgatgtcattgaagtagaaggtaaggtagttgataccttacctaatgctatgtttaaagttgaattggaaaatggagccacaattttagcacacgtttctggtaaaattaggatgcactacattcgtattttgccgggagaccgtgtgactgtggaattatctccatatgatttaactaaaggtagaattacgtatcggtttataaagtaatataacggagggaaacatgaaggttagaccatctgttaaaccaatgtgtgaacattgtaaagttatcaagagacatggccgtgtgatggtaatttgctcagcaaatccaaagcacaagcaacgtcaaggttagaaatagagggggtgtagtttatggctcgtattgctggtgttgacttaccaagagataaaagaatcgttatcgctttaacttacatttacggtatcggtgaagcaactgccaagaaaatttgtgctgatgctggagtatctgaagatattcgttcaaaggatttaactccagaagatcaagaaaagcttcgtgctgaagttgacaagtaccgtgttgaaggtgacttacgtcgtgaagtaagcatgaacattaagcgtttagttgatattggttcttaccgtggtattcgtcaccgccgtggacttccagttcgtggccaaaataccaagaacaatgctcgtactcgtaagggtactaagagaaatcgttaattttatttataaggaggtttattgatgcctgcaaagaaaacagcacgtaagcgtcgtgtgaagaagcatgttgaaagcggtgtagcacacattcactcaacgtttaataatactttagtcatgattactgacgttcaaggtaatgcagttgcttggtcttcagctggtgcattgggctttaagggtagtcgtaagtctactccatttgcagctcaaatggcagctgaagcagcagctaagagtgcaatggaccaaggcatgaaacatgtagaagtttcagttaaaggtcctggtgctggtcgtgaatctgctattagatcacttcaagcaactggtcttgaaattactgcaattcgtgacgttacgccagttcctcacaatggttccagaccaccaaaacgtcgtcgtgtttaattttgtccttgatataggacgtaacgttttgaaaggggcccagtaatgattgaatttgaaaaaccaaatattaccgttgttgaacaagaagattcttacggtaagtttgttgttgaaccacttgagcgaggctttggtactactttaggtaattctttaagaagagtattacttacttctattccaggtactggacttgtttatgtgcaaattgatggcgttttacacgagttctcaacagttcctggcgtcagagaagatgtaaccaagatcatcttgaacttgaagaaacttgaattaaagtctctttcagatgaacaaaaggttattgaattggacattgaaggtccagccacagtaactgctgatgatcttaaagttgatgcagacgttcaagtcttgaatccggatcaatatatttgtaccattgctgaaggtggacacttgcatatggaacttgccgtaaagaatggtagaggttatgttgctgcaagtgacaataagagtgatgacatgccaatcggagttatcccagttgactctttattctcaccaattaagaaggttaactaccaagttgaatcaactcgtgttggtaagagagatgactttgataagctcacttttgagatttggactgacggttcaatcaagcctaatgacgcccttagttttgctgctaaaattttagttgaacactttaaggtatttgaatcagcagatgcaaatgctaaattcagcgaagtaatggtggaaaaggaagacgataagaaggaaaagaagcttgagatgactatcgaagagcttgacctttctgttcgttcatataactgcctgaagcgtgctggcattaatactcttcaagagttaactgacaagacagaatcagatatgatgcgtgtacgtaacttaggacgtaaatcattggaagaagttaaaaataaattaaccgacttaggtctttcacttcgtcaagaagactaagcttaggtgaataaaggaggcaaatccatggcataccgtaaattaggtcgcgatagtgctcacagaaaagcaatgcttagagaaatgactactcaattaatcatgaacgaacgcattgttactactgaaactcgtgctaaagaagttcgtaagactgccgaaaagatgatcactttaggtaagcgcggcgatttagcagctagaagaaaggctgctgcatttgtacgtgacgaagttgcagatgttcacgaagaaaaagatgcagttgttgttaagtcagcattgcaaaagcttttcagtgatgtagcacctcgttacaaggaccgtaatggtggttacaccagaattttgaagttagccgttcctcgtaagggtgacgctgctccaatggttattcttgaattagtttaatttagagtaacacaacttaatacgtattaagaattatccatgaaagtgagaataagcgtaaagatgatggcgcaagcttagtctagcttagatgataaaaatcatccctcttcatgggtgattttttttgctctttttttctgttacaatatgctaataagcgatttaagaaaggaagtggaaaaatgccagtagatagtgctgttgaatttaaggatgtctcatttacctatcccgatactaaaaaagcgattcttgatcagattagttttaaaataaaaagaggttcctggacatctttgataggtcacaacggtagcggtaagtccacaatttctaaattaattaatgggttacttttgcctgattctgctaataattctagaatcactgttttaggaatgacgttaaatcaaaagacagtctgggatgttagggaaaaagtcggtattgtatttcagaatccagataatcagtttgttggagctactgttggcgatgatgttgcttttgggcttgagaatagagctgttcctcgggagcaaatggtaaaaatagtcagaaaagttttagcagacgttggaatgctggattatatagatgcagagccagctaatctttctggtggacaaaagcaaagagtagcaattgcaggtattcttgccgtagaaccgaaaattattattttagatgaatcaacttcgatgcttgatcctaaggggagagagcaggtgctaaaaattattaagcatttaaagaaagagaagaatttgacagttatttcgattacacatgacattgatgaggctaatatggctgatgatgtgatcgtcttaaatgatggcaagattttagctcaaggaactccaactgaaatttttagtaaaactgaaatgttgcaagaaatagggctagacattccatttgtacaaaaattaataaataaattaaatgaagtgggaatttctgtacctaaaaatataaaaacgaaagatgagttgaaacaatatctatgtcaattaaatttgaaaaagtaaattatatctattctcccggaacttcaatggagaaaaaaggattagataatgtttcatttgaattaactgaaaatagttttgttgcattggtaggtcataccggtagtggtaagtcgactttgatgcagcattttaatgcattactgaagccgagttcaggaacaattgatattgctggttatcatattactgctcaaacaggaaataagaatttgaaaaagttacgcaagcgggttagtttggtttttcagtttcctgaagcacagctttttgaaaatactgtgcttgaagacattgaatttggtcctaaaaactttggagcaaccgatgatgaagctaaaagtaaagctttgaaatggttgaagcgagtaggattggataaatcgctagcaaataagtcgccatttgagttatctggaggacaaatgcggcgtgttgcaattgctggggtaatggctgatgaaccagaaattttatgcttagatgagccagcagcggggttagatcctaagtctcgtaaggaaatgatgaaattatttgttgactatcaaaaagcaggtcatactgtaatcttggttacgcataatatggatgatgtggccgaatatgcagatgatgttttagtgatggaacatggtaaattagttagacatgatgcgcctaaggcgatttttactaataaaaactggctagaaaagcactatttgagtgaaccaacggctagtctttttgcctcagatttgacgaactttaactttaaagataaaccgttaacactggatcagcttattaatgaaattaagaaaaatttgcgagggtagtttatgagtaagataattgtaggacgttatattccgggagattctcttatttataaaatggatcctcggagtaaattattagttaccatattatttatattggctatctttttagctaataattcaataacttatgcgattgtgaccattttttgttttttggctgtgatcgctacaggattaaatgcaaaagtattttgggatggcgttaagcctttgattggtttaattttctttacgtcgcttttgcaattgttttttatgactggtggtcatatttattggcattggtggattttttcattatctagctatggtttgattaatgcaatctatatttttattcgttttacattaattattttaatttcaacagtaatgacagttactacaatgccacttgaaattgctgatgcgatggaatggctgcttaagccgcttaagttgtttaaagtgccggtggataaaattgcgttagtaatttcaattgcgcttcgtttcgtaccaacattatttgatgaaacattgaaaattatgagtgctcaaagatcacgtggagcagattttaatgatggtggtttgattcaaagagcaaaagcaattactccaatcttagtgccgctgtttattcattctttagaaacagcaattgatttatcaacggcaatggaatcacgcggttaccgtagtagtgaaggacgaacaagatatcgtgttttaagttggtcaaaatatgatctaattgcattaatctattttgtattgttggtcggattattattaatttttaggacacattaaagatatgacaacaagatataagatgacgatggcttatgatggccatctttttcatggctttcagcttcagccagatcagcgaacagtgcaaggaacaattgaggatgcactgaaaaaaatgactaaaggaaaacgagttattgtgcagggctcaggacgaaccgatgcaggtgtgcatgcagttgggcaagtaattcattttgattatcctgggaagacaataccagcgaatagaatgattttagcgatgaattcaatgatgccaactgatattatttttaataattgtcaaattgttaatgatgattttcatgcacgttactccattaaaggaaaatggtatcgttatcgcgttagtttagatcattttgttaatccatttaaacgtttttatacaggacattttccatatccactagatattgaaaagatgcaaattgcggcacaagatttgttgggaaaacatgactttactagttttgcggctagtggtggtcgaattgaagataaagtgcgaacaatttattatgtaaaaatcacagaggataaaaaagataatgaagtgatttttgacttcattggttcaggattcttatataatatggttcgaatcatggtagcagcgttgcttgagattgggaatgatcgtagaccagtgcatgatttgcagcgggtaatcgcggcaaaagatcgacaagaagtgagacaaacagctcatgccagcggtttatatctttatcatgttttttatgatgaagtaccacaaaaatatcgcttagatcagcatttataattgacattttgcctaaaaggacgtactctaatatagtatgtttgtccacgataggccccggaaacttattgttttcaaactgcaaataaacggaggaatttaaattgcgtactacaccattagcaaaatctagtgaaatcgaacgtaagtggtacattattgatgcaactgacgtaacccttggtcgtctttctgctgctgttgccactattttgagaggtaagaacaagcctcaatacacacctaatgttgatactggtgataacgttatcgttatcaacgcatcaaagattagattgactggtaaaaaggcttcagacaagttctactaccaccactcatcatggcgtggcggcttgaaggccgtttcatacggtgaattgcttgctaataacccagttaagatggttgaaatctcagttaagggtatgcttccaaagaacactcttggtcaccatgaattcatgaagatgcatgtttatgctggcgaagaccacaagcacgaagcacaaaagcctgaaaagttagatattaacaaattaatctaggaggttatataatggcacaacaagctgcatacacaggtactggtcgccgcaaggattcagttgcgcgtgttcgtttagtaccaggtaacggtaagatcactgttaacgataaagatgttgatcaatacattccattccctaacttggttaaggacttgaagcaaccattgacattaactgaaactgaaggtcaatacgacattcacgttaatgttaacggtggtggtttctcaggtcaagctggggctatccgtcttggtatcgctcgtgcacttcttgaagttgacccagacttccgtagtccacttaagaaggccggtttcttaacccgtgacccaagaatgaaggaaagaaagaagccaggtttgaagaaagcccgtaaagcttctcaattctcaaagcgttaatatttacgttcaaaaatgttgttatatcaacgttttggagacttcagttggtcacctatggtcacaatgctatagggattccaatagatttaaagcattcgcatcttgcgagtgctttttttctggcattaattccagatagtatttttcagtagttaagattgaatcgtgtcctaatcttctgctaacataagataaaggaatattattactgaataaaaaagaagcgtgggtatctcttaaaccatgaaatgtggttgaagggatgcctatttttttgagcaattcttttaacataccagactgtttaaagctgaaccagtcaaacaaatagccagaatctttttgagagatatccttcaatagatcgtaaatattcttaggaatagtcacactgcgtctagaatgtttagtttttaatttagtatcgtcagtagtagggctaattgatcgttttacttcaacgcaataatactgaccatcgtaatgcacatcctcaggcttaatacctaaaatttcaccacgtcttaaaccagtactaatctcaagtaataccattaagttaaattcattatctgtatgttcaagtaagtaatgttttaacttagttagatcagacattgatgaagctttattgcgtttaggtaattcttttccgtgtgctttaagtaaactagcaaaatcattgtaaatgtatcccttaacataagcatagcggagagcagttctaattttcttaagtaattcagttaccgttttcttagaatgtgttttgccatatttatctaagatactttgcatttgtacgtcatcaagcttaccaagtttagcggttggaaaaagattatcaattactttaccagctttaacataattatcaaaagttgcttttctaacgtcatgtacttttactgtttgaacgaataaataataaaagtccttgaataaagtgttttgctgggctattgcttgacctttagccttttgtagttcaagagtagtactccaaactttagcttctttttcagttttaaaactcttagttaagtaatcacgttttccgagactgtaaaatagtttgtgtaaggatgaatgattccttaaatttatttctttaaacattagaaaaaggagttcctttctcgtatgattggtttgaacaaaaaaacacatacagaaagaagaactccttcatgaatgattttaccaaagattttgctcaagctctattcaatccagacaaaataaatgatttattgcgcaaagagctacaacaggctgttaataacttgctagaagctgagttgactgcctttctaggctatgatccctatgccagaaatggctggaatactggcaattctagaaatggtgcttatttccgcaaggttgatacccagtttggaccaattgaagtgcaagtgcctcgagaccgcaacggtcagtttcatcagcacacgctgcctgactacaagcagcactctgatgttttggaaagcacgattatcaagctatactccaaaggcgtaactaccagagaaatcgctgacttgattgagaaaatgtatggcagtcattatagtccagctcaagtatcaaatatttccaagcagatgctccccaagattgaggcttatcacaagcgcaagctaagcgacaagtttttctgtgtctatttggatgcgacataccttcctttgcgccgagaaacgtttgagcgtgaagcagtatatattgccattggcattaaacctaatggacataaggaagtcattgactactgcattgctcctagtgagaacattgaagtttggacagagatgcttcaaaacatgaagtccagaggcttgaagcaagttgagctttttctttctgatggtgttgttggcatgaaaacagccttggccaggacttatcctaaagctcattttcaacgctgcctggttcatgtcatgcgcaatatctgcgctaaagtacgcgtcgacgatcgtgaaaagatcatgaacgaattcaagcagatacatcaacagacaagcaaaaaagaagctgcagctgtcttgcacaaattctatgccaaatggaataaagcttatagccatgtcatcaaaggtttgaaggaaattgagcccgatctgctagtcttctacaattatcccaaacaaatcagagcttcaatttattcaaccaatatgattgaatcctttaacaacgtcatcaagcgtaaagctaagcctaaggcagaatttccaactgaacagtcgcttgatgcatttattggcatccaggcaatgagctacaatgaccgttatttcaatcgaattcataaaggctttggtcaggttcaggacaccttagaatcctactttgattaaataaataattaaaaaatcaatttacgagaaagatctatttacacaaaagatttgacagtttccgttttccatgttgatagattgttactctggctctatatgatgagccacgtttttcaatacttgccataaatttaatcgtcctttcaaaagaaaagccgattatcttaccagcaataaagttagcagataaccgactatttctcaaatctttttcaattttgtttctttaagatcgatgaaagcttcgatacttttaatggtaaagcgttctgtgtgttctcctagtttaaatcttttaaagtcaggatcagagcgaaatactttatcaaaagttttgggatcaataccaatatattttgaagcttcttcgcgagttaataatttagccactattattctcctgagattgtttagttaccaatattgagataaaatctaggtagtaggtaatctagtcattgcttttgtctctattagcatgactagtatttttttgcgattttatcttccaaattgcttcggataatttatcatcagtgattagatcatttttaactttattagtattgcttttagtaagttgcaacgggataattcgtcttttcaactgttcaaaagaatcaatgacttgattagcaatattacattcaagataaaaactaagtggatcataaggggtagtgatgtaaatggcacgcgcatttagataacgatcgtgataccttgcgggagccattttgtctatttcccaaggatccaaaagggtaagtagttgaccatagtcatagtcatttggtcgcaagtcattaattactatgaatttttgccctttgtattcttgaaagtgatcccgttgactacctgaaatacagaaatcttcaggatgttgtttttctaaaatttcccgtactaacttagtcttaccaattccggaaacaccatatatccagtagaccttacaactctgacctttgaagtcctttaaaaaccgttgatgctttttgtaagctaggatgtcttcaatatgatctaacagtgttttatgttttgccatctcaagaacaccgatttcttcttgaagttcttctttagtgattttttcatttgaataatcatcaataaagttttcaattgcttgtcgtgatggctttttgactttttgtctaatctcattgattctatctttaaaatcaaatgaagctactacttcttttggatcataatgatgtttactcttagcattagtagtttcatggatcagatagctatagccattgttaataatactgtgccatgcttcaatatattgttcatgatcattgaaaatcttagatactcttgaaatggttttagcatctttgaaatgaagcattacatgatagtgaggtcgaatcttttaacttatctttactaaatggtaaatgatctaaatcttgggtatacataaagttgtgagaacgtattatttttttcacaattaaagatttcctttctattcaacacgaactacatattaactttggggctagataacaagttcattattactttatttttgtttatcagatggaaagcaattgcaagaagcagcagatatattagccaaggctaaggtgcatctatctatggtgatattttcaccttaaatcaaactgcagcagctatggttaaagttgctcaaggaggtaataagggtaaagtattactgcaaatgaatgaagcttaagttaacatgaaataataaatacatttagataaagaaagaccctcaaagattctaaatttgaatttttgagcgtctttttagattgctaatcattttaaaggtacttgtattacatttactcctgctttaataaattcattaattacactgttttctacaaaagtatcagttattaataaatcaatatcttttattgttccaatagtaaaattagagaatttattgaacttgctatagtcggcaacaacaataaccttttgtgattgctgaataatagttttattaacttctgcttcttccataactggtgttgaaataccttggttaatgctaattcctgcgcaaccaataattgcatagttggcacgtaaagatagaaatgctttagttgccaaatcaccgctcatgattaatttatgatgtatttccccacctgttaagatcactttgcttttagtattttcaaaatttccagcataaccattgttagtaacaattattatatcctttgttaataaatgtggaattgcatcaaaggctgtactactagagttaataaatactatatctccatcgtgaatatatctggctgcctcttttcctaagctttgcttaatgtaactaacgggctgagataatgggatttcttctggtgcaacaagggatatgacaccacgcttttttgaaatcttacccatttttgacaaataatcacagtctcgtcgaatagtcatttcagaaaccttcatctttttgcttaattcagaaatagaaatttcccttgtgtgatttagtaaatcaatgatttgcttgcgacgttttttaattacttgaattgaatttttcatttttaatgatctctttcacttcaataaatacttactaatacttcaccagaaaagcattaacttttgaatttaaataaaaaacgccccgaactggttactattttaccattcaaaataataattcacatattttatgttataaatgacttgaattttacaaaaattaacataaaatatgctaaattaacatatataatggttgaaagcactcacatctaagcgcataataacattgaagacgaggataagaaaattaaggaggatttattcatgtcagcaccaaaaaaaatagaagatgttaatttcaaaacttttgcagaaaacaatttcccagaatggggtacgttcttgaatgaacaaattgctgataagcaagtaccagaaaaaagtattgcaatgtggtggttaggctgtatgggggtttggattaagactcatgaaggcaccaacgttgctattgatatgtggaacggtactggtaaacatactcacggtgacggtaagatgcgtaaaggtcaccaaatgatgcgtatgaccggtggtgaagctttacaaccaaaccttagaaacaagccatatgtaattgatccatttgcacttcgtgatcttgatgctttatgtgtaactcacactcaccatgatcacttggatatttacactgcagcatgtgtaaacaagtattgcccagacgctaaatttattggacctcaaggcgttgtcgatgaatggatcgaatggggtgttccaaaggaaaagaccattgttgtaaagcctggcgatgaagtcaaggttggggccgtaactattaaggcaatggaagcctttgatagaactgaatttgttaccgaagatgatccaaacaagaagttagcaggtactatgccaattgaaatggctaaagttgctgttaactacttagttaagacttcaggtggtaacgtatatcactcaggtgactctcactattcaaacacttacgtaaagcacggtaacgaaaacgaaattgacgtaactctatgtgcatacggtgaaaacccacgtggtatcactgataagcttgacgactcacaagttttgagaatgggtgaagctttaaagacaaaagttattattccaatgcactatgacatttggactaacttctacagtgatcctaaggatattttagctctttgggaccgtaaaaagtaccgtttgcaatataaatttaagccatatatttggcaagttggtggtgaatttgattatccacaagacaaagataatttcgaatacatgtatgatcgtggattccatgatgcatttaagaatgatccagacttaccattcccagaaatgctatagtcccgtttttgttgattaactagctcaacgtctttaaccaaagctgttgagctgagggaggagacgctgatgttacgttactttttagaaaataatttattaaacattactgatgaacatcctgagacttgggaagaagcaattagagttgctggtaaggtaatgaagcaagacaagttagttactgatgattatattgattcagttattgctgatgttaagaaatatggtccatacattgttattgttcctggtgtggcaatgccacactcaaaggctgatagcgaaggagttttaggtactggtataggtcttacaattttgccagaaccagtttcattcgatgaatcagacccagataaaagtgcaaaattattctttatgctagcagctaaagataataatacacatgtcaaaaatattgcccatttatctgacatgttaatggaagataacatgattgatgatctttctaaggttaagaatttagacgattataaggcagtaatgaagaaacataatatgtgatatcggaagcggggagtataaatggctatattaaatattctatctaagatatgggattattttgctaccaatattttgcaacaaccagctttcatgattggttttattgtcttacttggttatatcttagagaaaaagaaatggtatgaggtcctttcaggcttcttgaaagcaacagttggatactttattttatcggctggttctgttggactgatcaatacttttagaccaattttagtcggattaaaagatcgttttcatttgaatgcgatggtaactgatccatattttggacagaatgcagttactgccggaattatgaaagagtttggtagatcttttgccgatgctatgcttttgttgttatttgcatacattatcaatatcgtgttagtaagattttcaaaatatactaaattacgtgctgtttttacaactggtaacgtgcaagtacaacaagcggctaccgctttctggttgatcttgttctgttttccaaaattaggtcatttacctattttaatcgttatgagtattatcttaggtttatattgggccgttggttcaaacttaactgtagatattactcaagagttaactgatggtgctggctttgctatcgctcaccaacaaatgtttggtatctttattttcgctaaattatcagaatttttggaaaatagagccaaaaagaaaggtaagaaagaagccagacgattagaagatgtaaagttaccaggtttcatgtcaattttcaacgacaatatggtatctacatcaattttgatgttaatttttatcggtgcaattttagtagtattaggtccagattacttagttaaagctaaatttatgcaacctggccaaagttttattttctacatcttacaaacttcattacaatttgcagttttcttagcaatcttacaattaggtgttcgtacattcgttaatgaattgactgaatctttcactggtatttcagacaaatggttacctggctcagttcctggtatcgatgtcgcagctaccttaggttttggttcacctaacgcaggtacaattggtttcttgtttggtgcattaggacaattcacaatgatcattttattgttgattttccactcaccaacaattgttatcgccggatttatcccgttattctttgataacgctgctatcggtttgtattcaaataaccgtggtggtttcaaatatgcaatgatcatgccttttatttctggattgatccaaataggcgggtctgccttaattgctacctgggtaggtatggcgaaatacggtggttacatcggaatgttcgattgggctacagtttggccattcttcacagtattgatgaaattcttaggctttgttggtattgctcttgtaataatcattttggtaatgattcctcaattgcaatatcgtgccgataagaaaggttacttcatgattactgaagattatgaaggttggaagaagttacatggtaaagaatagaggttaattaaaatgaaaataatgtcagcttgtgctaatggttcgggaactagtttaatgctttctagaaccgcaagaaaagcaatggaacaattaggttatgaaattacagtttcagatcatacttctgtttcagaagctagaggaactgctagaaactatgatgtggtatttacatcattaccttttgtgaacatgtttgatgaagtaaagcaaaagggtggcgaagtaattggcgttaagaatgtaatgtcagttcctgaagtaaaagaaaagatcgaagcttcagatattccaaataagtttaagaaataatcttaggagaattaatttatggctttaccaatgttacaagttgctttggattgcgagagtactgctgaagctttaaatgtcgcaagacaagtaatggatcaagttgatgttttggagacaggaaccattctttgttatcaagatggtgtaaaggccgtatctgctttaagagcagtgggaccagataaaatagttttagcagatgttaaatgtgctgatgccgggactaagttcggtaaggcaagcaaagatgcaggtgctgattggatgacttgtattaatgctgctactgttcctaccatggttaatgctagaaaagaaattgaagttcaagttgaattatatgaaggctgggacaataaagaacgtatgcaagaatggcttaacaatggtattgatcaagttgtttaccaccaaagtagggatgcaaaatttgcaggccaaaaatggggcgaaaaagatgttgcaaacgttaaggccttgattgacatgggctttaaggtttcagtaaccggcggagttcatccggaagttttgaaattatttaaagacttaccagtgtattgttttattgccggccgtgatatcagaaatgcggaagatccacatgcgcgtgctaagcagtataaagatgaaattaagcgcatttggggttaatcattaattttactcatattaaaaaattccttaattagttttagaaagggcaatgcacgtaaaaacgtttattatgcattgctctttttgtattaaaaggcaggtataggttatgactgtaaactcattaggtatttacgaaaaagcattaccacaagatttatcttggaaagaaaaatttaatttagttaaaaaattaggcttcaattttttagaattttctgtagatgaaagtgatgcacgcttagcacgtttggattggaccaaggaacaaagaaaagaatttagagatttaatgtgggacactgacattcgaattaataatttgatgttatctggccacagaagatttcctcttggatctaaagatccagaaaccagaaagaaatctcttgaaatgtgccaaaaggcagtagatctctgtgtagatttaggaattcataatattcaaatggcaggctatgatgtttattatgaagaaaagagtgagaactctagagaattatacgttgaaaacttagctaaatgtgttcatatggctgcaaagaaaaacattatgctttcgattgaaacaatggatgatccatttattactaacattgcagatattaaacaatataaaaagcaagttagaagcccatggcttcaagcctatccggatttgggtaacctctctgcttggccacaaaatgatcctgctaaggatttagagaatggaattggtaatattgttgccatccacttaaaagatactctggcagtaacagatggttttgagggtaagtttagagatgttccatttggtgaaggctgcgttgattttgaaggactacttcgtgaattagtaagactagactataacggaagttttacgattgaaatgtggccaggtgataacggtgatgatgatcctgttgctgaagttaaagaggccaaagctttctttgacaagatctttaaaaaagttggaattgaacaagaacctgtagattagaaagtggaaaataaaatgttagaagatttgaaaaaagaagtctatgaagccaatatgcaattacctaagttaaatttagttacttttacttggggaaatgtttcagggattgatcgtgaaaaaggtctgttcgtcattaagccatcaggtgttccatatgaagaattaactcctgaggatatggtagttgttaacctaaaaggtgaagtggttgaaggtactagaaatccatcttcagatactcctacacatacctatctatataatcattttcaaaagattggtggtatcgttcatacacactcaccttgggctgtttcatttgctgcagctaagatggatattccagctttgaacaccacacatgcagatactttctatactgatgtgccagcagctgatgcattaactaaagaacaaattgaggaagattacgaaggtaatactggtgtcactattgtcaaaacctttaaagagcgtggtctcgattatgaagcaacaccaggtgctttagtttcacaacatggcccatttacttggggtgaaacaccagctaaggctgtttataatgctaaagtcttagaagttgtggcggaagaagactatcatactttgcaattaacacgtgctaattgccatttaccacaatacctacttgataaacactattatcgtaagcatggtaaaaatgcttactatggtcaaaataatgctcattcaaaagatcatgcaaagcgtgcctaaaactaaggggtaaaaaatgcttgaaaattatttttttgattttgataaaactctggctagttcaggtaaggcgtcattgattgcgacaaagcaggcatttaagttaaataatttagatgagccagatgatgatcaaattttagattttatgggtattcctgctgatgtttcattccctaaaatggctaatagagaattgtcagaaagtgatgcgaaaaaattagttgatacctaccgtaatatttatggaaagtatgaaaaagaaaatacacatttatatcctggaatgcgagatgtactagaggatttacagcaaaaaggtaaaaatttatttgttgtatccagtaaaagtcatgatattttaaagagaaatttagataatttgaaaattactcaatattttaaagactttgtgggatgcgatgaggttcagcattataagccagccccagatggtattttgatacttttagacagatacaatttgaataataaacaaagtgtaatggtaggggatgctcgttatgatttgcaaatgggcaaatcagcgtctgttaaaacttgtggagcagcttgggatgcttttagtgtggatagcttaaagaatgaacatcctgattatttgctatttcatgtggcagaattaaaaaatattgaatagagttcatatattttaaaattggatggtatcaattttgaaagtagttgaactctttagcaaaaatgatattattaacttgtaagggaaaacggttacataacgatggtctataggaggacatcatggctgtagattacgattcaaaagaatatttaaagagcgtcgatgcttattggcgtgcagcaaattacttatcagttggtcaacttttcttaatgaaggccccacttcttaaaacacctttagttgctgaagatgttaagccaaagccaattggtcactggggaactattgctccgcaaaactttatttatgctcacttaaacagagtgttaaagaagtatgatctggatatgttctatattgaaggttcaggtcatggtggtcaagtaatggtttctaactcatatctggatggttcatacactgaacgctatccagagatcacccaagatgaaaagggtatggctaaattgtttaagcgcttcagtttcccaggtggtgtggcatcacatgctgctcctgaaactcctggatcaattcatgaaggtggggaattaggttactcactttcacacggtactggtgctatcttagataatcctgacgtcattgctgctgttgaaattggtgatggtgaatcagaaactggtccacttgcagctagttggtttagtaacaagtttattaatccaattaaagatggtgcggtattaccaattttgcaaatcaatgggtttaagatttctaatccaactattgtttctcgtatgagtgacaaagaattaactgaatacttccgcggcatgggctgggatcctcattttgtttcagtctttaaaggcggtcgttttgacggtgaaaaggatccaatgcaggttcacgaagaaatggctaagactatggatgaagtcattgaagaaattaaggctattcaaaagcatgcccgtgaaaacaatgacgctactttgccacattggccaatgattatctttcaatgccctaagggctggactggtccaaagaaggatttggatggcaacccaattgaaaactcattccgggctcaccaaattccaattccagttgcacaagatgatatggaacataaggaaatgcttgaaaaatggcttaagagctacaagccagaagaattattcaatgaagatggttcacctaagaagatcgttactgaaaatacggctaagggtgaccacagaatggccatgaatccagttactaatggtggtaagaaccctaagcgtttgaacttgccagattaccgcaagtacgcattgaagtttaagccaggtcaaatggaagcacaagatatggttgaatgggctaaataccttagcgaagttgctgatcttaacccagacacattccgtggctttggtccggatgaatctaagtcaaaccgtttgtttgcacttcttgatgatcaaaagcgtcaatgggaaccagaaattcatgaacctaatgatgaaaacctagctccaagtggtcgtgtaattgattcacaattgtcagaacaccaagatgaaggattccttgaaggctatgttttgactggccgtcatggcttcttcgctacttacgaagcctttggccgtgtagttgattcaatgcttacccaacacatgaagtggttaagaaaagctaaggaacaatactggcgtcatgactatccatcacttaactttgtcgcaacctcaactgtcttccaacaagaccacaatggttacactcaccaagacccaggcatcttgactcacttatatgaaaagaatcgtccagaccttgttcatgagtacttgccatcagacactaatacgcttttggcagttggcgacaaggctttgaaagacagagaatgcatcaatgttttggtaacttctaagcagcctcgtccacaatggttctcaattgaagaagctactaaattagctgataaaggattgagttacattgactgggcttcaactgatcaaggctataagccagatattgtatttgcttcaactgaaactgaaccaactttggaaagtttagctgcaattgatatcttgcacaagcgtttcccagaccttaagattcgttacataaatgtagtagatgtgatgaaattaatgagtcctaaggataataagaatgctatctctgataaagagtttgatcgcttattcccaagtgacattccagtaatctttgcatggcatggatacaagactatgatggaatcaatctggtttgcaagaaaccatcataatatacatattcactgttacgaagaaaatggtgatattactaccccatttgacatgcgtgtcctgaaccaccttgatcgtttcgacttggctaaggatgctgttgaaagtattccatcattggcaggtaagaatccagacttcatcaatgaaatggatgacttgcttgctaaacaccaccaatacattcgtgataatggtaaagacattcctgaagtcactgagtggaagtggacaggtcttaagtaaaaaataaagtgtctgggaaaaaactaactcttagaccataataataggacgatcaaaattcttaagtgagttttaatcgtccttttttcttttaaaattaaataaaaacggtcttttggtcattttctgttccaatatttgcttatattcatcatcatgaaggctattccaacatcggtttcaactttctttttgcctcttagatgtgtttgccttcttcgctttgaagaacttcttttgctttttcttttaaatactgccagttagggttatagcgtacttgacgctggcgaccgctagctgtcttagctaattgttccagttctgacgtaagcttcaactgcctggcccttcagcttatcatgatacttttcgacagccttgcgccaaacaaaagtgtagcggttagcatcagcttcaattttagtgccatcaataaaaacagccccctcgttgatcagccaacagattggtaaagtagataaagctcttcttaaccagttcattggcatgactgctgtgtggtatactggtcgacctgttttagcagggtgtaaagcagaatagcttctggaatcgaatccacaatccagctgatagcattagccaagtgattgctgggaatggtaaaatccaaattgagtgttaaagctgtttgacctgtgatatgatttttgtacatattagtttccacctttttgttttaatgaaataagaggccacaaatgatcacattttttatggagaaatttaaaatgttaaattttagatcatatgaagacgcagatttcgaaaaattatgcaacatccacgatcaagcgcgaaagcaagaattaaaatttgccaatcttgaagctgcatttattccattcaaaatagcatcaaagaaagagcaattatttgaagactatcaagtttacgttgcaacaaaagaaaataaagttgttggttttgtcggatttaacgaagaagagcttggctggctctatgttgatcctaaagttcaaggacaaggtattggtagtaaactgattgattttacgcttgaaaattcgaccaggccattttatttagaagtgcttgagggcaatcctgcacaaaagctttatctcaaaaaaggtttcataacaattaaacatgaaagtggcaagatgccaggtaatgaatcatttagtgttgaagttgacctaatggaatataaataaaacatcccaatcaggtgtgttttttgttagacttataaaaaatgaagctagtcaataaagtattgtcttgtcattagaaagtactacatatgaagtatatttcatgaagtccgcttcatattttagggatgatgattatcaataataaaattaaggaataccgcaaaaaacatcaacttacacaacgcgagttagctgaaaaagttggtgttacagaacggacaataatttcattagaaaagggtcggtacaaaccatcgattgttttagcttataaattagtacaattttttgagacagatattgaaactttattttgcttaaatgagtatgtgaagaatgagcaagccaaaggaaggaatgcttacaattctttttgcgattctatcagtcatacagctcttagaattaatttatgatgttgcaaatagaaaaagcgtcaattatattcaagatgttatttggttaatattgggcatctgtttgacagtcggttatttctatagtactaaatatatcggtatagccaagattgaagaagatgatgaacgcgataaatttattcaaactaaaactaataatcaagcattcaatattttacagtgggtcctttttgttttaggtgcagtaacgataataattgatgttaatctcggccaaatgggattagattctcgtgcaatggttattatagttgtaggcgttgtattaatctttttatgggcattttcttggattttgcaattaatcttaatgataattaattatttttgcaattgagactacaaaaaataaagcgactggattagctctggtcgcttatttaaattttagtatggcatttctttaaaaaattagaatatcgatctttttcaccgtttaccttccaatattaaccattcaccgaaatttttaaatttaaaatattttttcgtctatactgataagcaagaaaggagaaaaagggatgaaggtaaaatttaacattgataatcaattagcgggagaaagtgctgaattttggttaaaaaagatgactaataaattcagtcaattgggtaaagaattaagtggtgaacaagacacgatttggtgcagttatgatgatgaaattattcctgtgaagtttgaaaatatttatttaattcaagtcgaacaagagcaaactttaatttatgacaaaacacagagttacaggtataaagggcaattatatcaggttaaaaatattttgccacataattttttaatagcgtcaagaagtgcaattattaattatcaaaaaattgatcatttggaagttatggatggtggcaatattgatgtcattatgaagaaccaaatgcgggtacaaatttctagaagaaaaattaaagacttgaaagagaggttagggttatgaaaagaatggaatctttcttggtaagtggaataagtggcatgggaattggattaacttggtattcaatagtaactttatttcaaacgggaacgaattggaaaaatgctcaaattccgtttacaagtttgctcttttatttgattgtctcttttgtgatgggagcatttttcaatttgacaggattgatttttgaacaaacgcaatggtcactacgaaaacaaattattgtaaacttttttgttagctatgttgccttttttgcttttgaattagtgattaatgatttggctttatcggttcatttcttcttagtaattactggagtatttgtcttgatgtacttgctcgcttatggtttgtactttttacaattattgcgagatgttaaacaaatcaatcaaaaattgaaagaaaagtaaataatcaaaaacgatcaagcctaaaaatgatccgtaccgtgtcaagtagacagcttaaatatataaattaatttgattaatcagttcgctattgtgcgagctgatttttcttttcatcaatctttttccaaaagtctttatatcttttatcttgttttattggatatgaaattatattctctggattattcttagcttcttttctaacctgacctgcgctcttgccattgaagcgctcctgaggatcataattaatatagtattcaatacttgctttaaaggctttttccatctcttcatagctatttgccttcggataaagaacttctcgcatttctttaattaaaccttgccagccttccattgggccattatcaatacagcggccaattctagacattgattgtggcatgccatgttcttctagctcatgcttaaaaggcatcctggtaaattgaaatcctcgatcactatgaagcattgcatgactattgggctctcttttccaagcagttgacagagcagcgttaactagggctgtatcattgcgcttgcttaaagcatagccaacagggaaacgatcatatagatcaaagatagtacagagataaatcttttgacttgttccaggaattttttcttcagtaatgtcagtgcaccatttttcattgggtttagtggcattgaagtctctatgcaatagattttcggcagtttcttccggtctagcagcttgatagcgatacctcttattaaatctggccttgctagtatagatgccattcacgcacatcaagcgagccacagttctacggtatattttggcctcaccgtctgctagctcattgtttaaagccaaagtcatcttaggagaaccaaagaggctgttattgctctcagctatttctttaatacgcttaagaatcttttgatctcttagttcacgtttgcttggcttatgattaagccatttgtagtaggctgaccgggcaatattggcttgtttgcacatccattcaattgaccacttatattctcggtgacattctttgatcaaactgtaaagagaatttcgctgctgttgtttaagtgctatttgtctttgttttggctgtccagcaaacacatcctttctaattccttcactttttttaggaaggctatctcttggtctttaatatcattttcttttttaagctgttcaatttcacgctttagcctttgagtttcagatagctcagcttcttttaaacgatgaccgcgcctatctgctaagccgtcagttccctttgcgctgtatttttttgaccagttgtatacttgggcatagctgcagccaaatttaagagctgcttccttgtagttccattgatgatccttgcagtatttcactatctgtttacgttcttctagggttgtcttttttctcttagtcatataagcctccagaataggattgtagtccttgagttcttgatgactattatacttgataacccactgctttaactgtgcagcacttcgcaaaccaaacttatttgttagataatcatatgagccttcgccatttaaataggcagctatgcatttgagtttaaaatctttactgtatctttgattatatttatgtggtcttaatgcttctggcccatgatctttaaatgcatatacccattggcgcagtgtagtcttgccagcccctaaaactttcgcaattgaagcaggtgatgcttcgccacttatgtattgtttaactgctttaagcttagcttcatagctaaatttactttttctagacatacaaaaagtcctgctttcatagatagtacaattttatatatttgtactgtctactaaagtaggactatatcaaaatcttgatcgttttttcgttggttagataaaaattataaactgtcttgaatattatcagctaagtagtcataaagcataccatgctttaattgcttagtatcaactcccaaagcttcagcaattgcataggcaaaggcccaagcggtagcaggaccacggcttgttaaaattttatgctctttatcagtaacggtgattttctctgaaaaatgagcacttggggcatcttttaagcattcttcttcaatgcctggataacaagtgaagtccgcatctgccaaaacaccatagcgagcaagagcacgtggagcagcacacattgcggcatcccacttgccagcttcatgacgcttaatcatcagatcacgtaatttttcattatcgcgtaagttagcagaaccagtcatgcctcctggaaaagcaaccaaatcataatctaataaactgtcatctacaactttgtcacaagtgatttcaatatgatggtcaccatctacttttttacttattaaacctaccatatcgcattcaacgttaagtctacgcaatacgtcaacaacgcttaaaccttcgacttcttcgcaaccgtctgcaaatactacagcaacttttgtcataaaatcatcctttctataactattttaattatctacttacattagatctaagtaaaatgaaagatctgctaatttgcttaaatgaagagtaggatgaggtgaaattggtatcttgtcttttttaggtgccagccataatgattttagattggcattttctgcaccttgaatttcttcatccagattagttccaattactaaaactgtgtctggatcaatatctggattgtctttcagaatcttaaagaaaatatttttgcttggcagcttgtccgtaaaatcatcggcgaaataagcattgtcaaatgaagaaagcaattctgtaggtgcaaggcgcggttcgatttgagtgcgcttttctttagcaagcaaaatcaaatgcagcttgccactgacttcatcaataaagtcgatggcgcccttgactaacctggtttgatccttcattgcatcatcaaaaacagttcgcgttttagaaagatcttcttttaaaaatgtagataaagctaaatcgatttgatcatcgctagataaatttttaaattctttttctaagctagtgtagcgtagtcgctcagctggtccccagtctaacccataatgttttaaagtttgccgcagcgcagttttttctgctaatttttcatttaataaactgccttctggaatgaaaattaaggtttcaaatgtagtcatgaataaacttcctttgtgttagttcctattagaattataatgaactagacaattttaggaaaggaattaaaaaatgacaatctggaccgtaattttcttattattaggtggcgttgcaggtggcttattatcgtcagtggcctcaatggcatcacttgcatcatacccagttttgctagcagtaggaattccaccagtatttgctaatgtaactaatgatgcggcgctaatttggactagcatcggttcaactgtatcttctactaaggagttaaaaggacattggaagcaagttttgttctataccatttttacagttgtgggatcaattttgggttgtattttgcttctatcttttcctccaaagatttttcccggatttaaaattgaagtgcaacactaagtgttaaacaaaaaggccatgaagacctaaacttgaagtgacgaaaaatcaagaaaggaagatctttatgaccaattcaaattctagcatttctaagcactatcatcaattaaccagcgtacaacgtggacaaattcaagcaatgctggattccggcataacttcccgtactgttatcgctcaagaagttggctgccataagtcgacaatcagtcgcgaaatcaaacgcggaagcgtcctgcaaagagacagcagctatttattgtatgagcactattacgctgatactgcacagatttattatgagaagcgtcgcaaaaactgctatcagcgcaatccattgaagcattatgctgtctttttgagaatgctctccagacgctttaaagctaaatttgatgccaccagcatcgatgagttcgttggtgaattcaaaaggactatgccaggctacccttgtcccagcacaccaactgtctatcgctatattgatcagggcttgctggacataagcaatattgatctgcctatgaagctcaaaagacgcaggaacaagcgtcatcacagccatggcggtcacgctttgcacaagaagcatcttggcaattccattgaacagcgtcctaaagagattgaagacagaaaagctccgctgcactgggaaggagatctggttaaaggcgtcagacgcaagaatcagcctgctttaatgactttgactgaaagaaccacacgctttgaagtagttatcaagattcctgactatcgggcaagcacatgccaaaggctgcttcaaaaggagattgacagacatcctgcctggtttaaatcaatcacgtttgacaatggctctgagtttgcggatatgaccaagatcaagggctgccagatttactttgctcacccatattctccatgggaaaggggcaccaatgaaaactgcaatggtcttttgcgtcaattcttccctaagggcaagagcatgaaagacaagtcaaaagcttatgttcaacaggcaactgatgccattaaccacaaatatcgccgaatcctccaatatcacacagcagaggaactcttcaagcaatatatctcttcataacctaactgttgcacttaatttgacaattcaggtccaaagatttttgaaaaagcagtaccattctttattgctttctcaggattgatgattattgtttctggtaaacaccatagtttaaatactaagacacagcctacttggcttaaaataatttattttctcgcacttttagtcatggggatgtatacaggttactttggtgcagctggtggagtcatcgtactagtacttttaacttacattaccaatgataaatttattgttattaacgctatcaaaaatgtgatttgtggttttgctaatttagtagccttgattatatttatgtttacctctcatatttattggcttcaggcaattcctttggcaatcgggatgttcattggtggctatattgggccagctattttaagacgagtaccggaaaagccagttcgaattttcattgcaagcttggccttcattcaagccggttacttcttttatacggcatatctgcaataagtttggtacaatattaagcaatgaaaagggggctaaggttgatggcaacagaagtttatttggtacgtcatggtgaaacaatgtttaaccaattggacaaagttcagggttggtgcgattctcctctaaccgtgaaggggattaacgatctaaagagaaccgctaaggccttgagtcaagttcactttgataacatgtattcatcggatttgaagagagcaattgataccgttcacttgatgaaggatgctaatgtggtctcggatattggtaaaattaaaaagctgcctgaatttcgtgaggtcttctttggaacttttgaaggcgatgatattaaccagacttgggaacaagtagcactagccgcaggaattgaccatgaagatgatgtaactaagatcatcaatcaggtaggcttgcgcaaatttcgtgcagcaacaaaaaaggctgatccgcgtcatttagcggaaaatcaggatgagttagatgagcggatggtacgggcaattgacgttttgcgcgatttaactaaagatgaacaaagagttttgttagttagccatggtgactttattaaaactttgtccataaaatattggaataagagtaatggcaaaaacgatattgtttttccaaataatgggagcgttactcgtggaattttgcacgatgacggttcatttgaaattgttgattataatgtagatgctgaagagctataaaagtcctactgccgaagtagggccttttttggtacactgataacgaaaggaaaatattttatgaataaagatcatacaactaagcgttatgtcttcgtaactctactgaatgttgttattactattgctgaatttataggtggtattttttcaggttcattagcactgctttcagatgcatttcataatctgagtgatgttggtgcaattattttatcttttgtggcgcacctgattagtcgcaaaagtcgtaatcagtttaagacctttggttatgaaagagctgaaactttagccgcttttactaatggcgttatcttgatcgtgatcagtgtggttttgtttgttgaagcaattcaacgtttctggaagccggaacatattcacggtggcattatgctgattgtctcgattattgggctggctgccaatattatttcaatgctagcaatgcatagcgattccaaggctaatttgaatgtacggtcaacttttattcatatgttaagtgatgccttgtccagtgtagcggttgtaattggtgcgatcttcatttacttctggaatgtaacttggcttgacccagttttgactattttagtttcaatctttgttttgcatgaagcttatgaaaatacaatgaaagcagccaatgttttgatggaatctaatcctgatatcgacttgaatgaagtgaacaagattgttttatcgttccccatagttcaaaatatccatcatgtccatgtttggcgctacagcgatgactttattatgatggacgcgcatattaatgtagccccaggattaagagccgatgaattagagcagctataccaagatattggacaggagttacaaaaagagttaggtattaatcatattaccttacaagcagagtgcgagcgtggcagaaaagacaagatgatcgttccaggccacggtattaacgaagattaggtgaaagaatgtttaatgttaatatttttacagcgattattgtattgattatgggtatttatgacatgtcctatgcttttaataggcgtaagcaacctaccaataaaggcggcattagagcctttatggctttaggaattatcttcacgatcgcaggaattgttatgatcgttagagtattaatgaagtaaggaatcttagaatggctaaattagtattagttcgacatggcgaaagtgtggcaaatgctgccaatgtttatactggctggaacgatgttccgttgactaaaaaaggtgaagaacaagcagaaaaagctggtgaattgattaaaaccatttcggattttgctcccacccacattcatacttcagtcttatcccgtgcaattgtgacagcaaatatagtagccgatgtctgcaatttattatggctaccgatgactaagacctggcggctgaatgaacgccactacggtgctttaaggggccttaataaggacatttcacgtaaagtatttggtgtggaacaagttctattgtggcgacgtagttttgattcagttccacctaagcaggggtcgccaatgattgatcgccgttataagcattttgatcagcatttgatgccacgggcagaaagtttacatcaaactcaaaaaagacttatgccatattattatgatcatatcgcatctcgattgattaatggtgaagaccaactgatcgtagcccacggttcaagtttgcgtgctttgataaaaaagctagagcagattaatgatcatgacatcgtaaaactggaagttcctaatgcggaaccgattgtttatactatggatgagcacttaaagattattaacaaacaaattttacgtaaataatgttaaaaatgcaccttagtgcatttttttaatgctctaaatgaggttttacacatatctatggtaaaatctattatgatttctagtatatttagtttggagtattaggcatgcgtaaattatttttattacgaggtgcacctggctccggtaaatcttcttttattgctcgccatcacttaaatccttatgcgatcagtcgtgatcaaattaggctactattggcggatttgacagtttactatcaagaggatgcggatgttttacaccaagtcattccgcggcacgtaactgtgcgtactgagcaaatggtggatcaccttgtagaacacaagatggaatatggggaaactgttattgtggatgggacgcatatcgttccaagtgcgattgaacattttaagccttgggtagacaagtatcactatgaatgctttgtagtagatctgatgcaacatactaccttagagagtttgcttaagcgtaatcagactagaatgcattacgattgggttaagcctgaagtggttaagcaaatgtatcgttcttatgaagcacatccagaagtaccatactgggcacataaagttgtgccaaatcagatggatcatgcgttgtcacagcgtgagacaaatttagatcgttatgctcatgtgattgcggttcctgacatggtagatgaagaagattttccacatgtgcatatctcgaacttttatttttcatttaatgacaagtttacagaaaagtatggaacttatcgaaatgtagtttcaattgctaaaactgaagatgaagcagttaagcagtttaagttgccatattttgtctttaagtttcatcacaagcactttttgatttcagcttatccaattcgaaatgagatgttggatccgatcagaaaggttaagggagtttggacatattcaactggtttgtataatgtagcggattttgtgaaagaatttccggaaaataaaaagcaacatgtgcatcagttcaacttaagtaagttagatccaacccgcttattacatatttggtaaaaaagacgtagttagaacattttatctaactacgtcttttgtgtaatttacttatattttgttttacttcaatttgccggccttagctaaaacttctttagccttttcaagtgaatggtgttcttcacgataacgcttgatgtcatagccatcaacatcggttaacttgctaagtctatcatcaaggtctttgaattctttttcaagatccttaatgacgccttcttcatcttcaacgtaaacatactcattttcatcagctttggcatcaatcttagcatcgtattcgccgacttttctagcatgtttcaaaatagatttaatatccttaatcgtttcatgttgtgcagtacggtgacgacgatcaggtactgaatcttcaattctagcgaagtggctttcagcatcactaattttctttgaaattctatctaatgcttttaattgtctttttgaatagtctgtcatgcttttttcatcctacgtaaactttaccatttgaatcctctctaccgaattcgccttcgttgtaggcctaatatttttgggatacaagaaaggacacttgaagttgtaaaaaaagtgtcagaaatttctttccgacacttaactatttgattatagctattaatacttaaatgctaaggcacccattggatcccatggcaataattgaattgggttatctttgccttcatcgtaagccttcttaagatcttctggtaagaatttcttgttgataactgcttggtaaacaaatgaattaaaccaagaatcactcattacgaagtaacccttaaagccaggtttttcaccccatgagttttcgatcttccatttagttggcttaccgtcaacgatatcaacaccggtaatcaccatggcatggtccatcatgctttcaccagaatcaagcatgtcggctttagacatagtgaagtcagcatcaaataattgatcacggcggtaaaggttagtatcaagaagtccagcacggcgttcagaatccttaactacgtttgaaccgaaccaaacaacttcgccactcttcaattgtttaatgattaagtccttcatttcatcaactttaaggtttaagtggcgaacttggcgaccgccttcaacgttacctaagtattcaactgagaataccttgtggaaaggtttgtcgttagttggagcattgatagttgagatatggtttgctaaatccatgccaacgtacttgtcaaagaattcctttggggtaatgtccctgtcaatatggtaattcttgtcatcatcgcggtattcgaagttgaacttctttggtggaacacccaatgaagtagccaaaatacagaagacatcgtttagcatttcttccttgcgagcttgtacttcatcttctgacttgccatcttgaactaatttacgtaactcaagaccatctttacgaagcaaagtatttaaagtgtcgtttaatgcacttgaattagtagcattagcagtttctggataaacactcttaggaacgataccatatttttcaataataccgcaaagcatgtcccattgaccgccgtcttgttgaggagtcgcaaataagaatgaaactttacgatcgcccaagtccttatcagcagttgcgatcacattttcaaagaaccagttagacttttcaaatttatcccagaagttagtgtaattttgagataattcgaagtcctttaacttaaatttcttttgtaatgggtgacgcatagtgtttaaagcactgaacatccagcagcgaccagactgcttttgatcggcagggttacctgtatcaatttcgattgagaaggttggatctaggtcgatcttagtttgtaagttttgactagctttgtagataccgttttcttgagcagcgtgactagccacatcaaaaacagggtggttagctaagtcttgttcaaatttattaatagtatcattgttgatttcttttaccataaaaaaaatcctcctttataagtacttaaattaattttatcttattcaaaatgagtcgtctaataatcttatcgattaaatggacgatgataccaaattttgtgaaattgaggatgctgggtgaagtagtcaatgatcataggatcaagcggccaaatgggtaagttagtttcttgagctaattgccaaactttttgcatttgtttttcaagcaaatccttactattaaattgtggattaataaaaaaatggttcattatccagacattactgtctttgcgagcgattttatctaaggtaacgctagataatagtatgtcttcttcattttttatagtgaaaatttggtgcgcatcttgcttattcataaaaaattcctttttaaaaaaataatctcatttttttgcgtaataaataatagagagctatttattttgtgttgactaaaaacattgtaaaatagataactgtcaaaataaaagataaatggagctttggaatgaaaacacgtggatttgaagtagtcaaaaagtatcaagatcaggaaattaatcttcctcgcagacagaccctagctagtgcaggctatgacatcgaagcggctgaagacattactatccctagcatttggcgactaaattttgtgcgaatttttaggttgattagaaatggacaccagctgtatgagcgcgactatgagatggcggatcagattttaaagccgttgttagtgccaactggacttaaagcttatatgccagaagatgaagtgttgattttagctaatcgttcatctaatacttttaagcgtaatctagctttgccaaatgggatcggcgttatcgatgcagattattacaataatcctaacaatgagggcgaaatttttgtacaaatgattaattatggcgtacggcccttgcacatcaagaagggagaccgtattgctcaaggcatttttatcaaatacttgaagaccgacgatgatgatccaattagtcgaaaaagagttagcggctttggatcaactaatgaaaagaagggtgattaatggctagagtaaaaacacaatataagtgtcgttcttgcggctatatttcggcaagctatttaggccgctgccctaactgtggtgcttggaatcaatttgaaaaagaaactgaagaagtgcaaaagcgttctactaaggcaactgctagtcgtttgattcagaagactggattaaatgaaccggtaaagctggataagattaaagctgaaaaagaagaacgaattgtcactaaatctgaggaattaaaccgcgttttaggtggtggtattgtgctaggctcactagttttaattggtggagatcccggaattggtaagtcaaccttgatgttacaaattatgagtgacttatctgaaaaatataaggtgctttacgtttcgggagaagaatcagctaaccaaatcaaattgcgggctgaccgactgggtgtaggtcaaagtaatatgctcttatatccagagactgacatgcatgatattcgcgaacaaatcaatgatgttaagcctgactttgttgtaatcgactccattcaaactatgaatgaaccaagtcttgattcgatgactggctctgcctcacaggttcgtgaagtaacaagtgaattaatgaaaattgccaagatggatgccattacagtttttgttatcggccacgttacaaaagagggtgcgattgctgggcctaagatcttggaacatatggtggataccgttctctattttgaaggggatgaacaccattcttaccgaattttgcattctgttaaaaaccgttttggagcagcaaacgaaattggaatgtttgaaatggttaatgaaggcttaagagaggtaactaatccatcatcaatttttctggaccaaagattacctaattctactggctctgctgtggtggtatcgcttgaaggaactaggccacttttagcagaaattcaggctttggttactccgacagcttttggctatgctaaaaggaccacgtcaggtattagttttaacaaagcttcattgctgctagcggtgcttgaaaagcggggaaacttaatgttgcagaatcaagatgtctatttgactgcaactggtgggattaaattgaatgaaccagcaattgatttagcaattgccatggcagttgcatccagttataccgataaagaaatttcgccgacagattgttttgtaggcgaagtgggcttaactggtgaagttcgccgagttgataaaatcgatgcacgagtaaaagaagcggctaaagtagggtttaagcggatctttattccacggcataatatgtattctggattaaaagatcatggcattgaggtaattctcgtttcgagtattccccaagctttaaaattagtttttggctagcattaattgaattcttactatataacgagtaaactaagattgtttgaatttactattttttgaaagaggcatgaattttggctaaagaaaaaatccgtgtaagatatgcaccaagtccaactggtcacttgcacattggtaacgcacgtactgcactttttaactatttattcgctcgtcataacaagggtacgatggtcttgagaattgaagacaccgaccaaaagcgtaatgttaagggcggttctaagtctcaaatggaaaaccttcactggttaggaattgactgggatgaaggtcctgataagggtggcgactatggtccttatcgtcaatcagaaagaaaagaaatttaccaaaagtatattgatcaattgatcgatgaaggtgaagcatattactcatacaagactgaggaagaacttgaagcacaacgtgaagaacaacgtgctgcaggtgttgcacctcactatacttacgaatatgagggtatgactgctgatgaaattaagcaagctcaagatgaagcgaaggctaagggcttaaagccagttgttcgtatccacattccagaaatggaaacttattcatgggatgatattgttaagggacaccttgagtttgaatcagacactattggtggggatttcgttattcaaaagcgtgacggaatgccaacttacaactttgccgtagttatcgatgaccacttgatgaagatcactcacgtacttcgtggtgatgatcacgtttctaacacacctaagcaattagttgtttatgaggcacttggttgggaacctcctaagtttggtcatatgacattgatcattaattcagaaactggtaaaaaactttctaagcgtgacgaatcagttcttcaatttattgaacaatatcgtgatcttggttacttaccagaagctatgtttaacttcattactcttcttggttggtcaccaaagggtgaaaacgaaatctttaacaagcgtgaattcatcaagcaatttgaccctgcacgtttgtctaagtcacctgctgcttttgaccaaaagaaacttgaatggattaacaaccaatacatcaagaaggctgatcgcgacactttgcttgatttagctttgaacaacttgcaagaagcaagtcttgttgatgagcatccaacaccagaaaagatggaatgggttcgtcaattggttaacatctactcagtacaaatgtcatacactaagcaaattgtagacatggctaagattttctttgaagaagctaaggatctttcagacgaagaaatcgaagaaatcaagaatgatgatggccgtggtgtaattgaaaaattcaagaagcaattagacctcatcccaagatttacttcagttcaaatcatgaacgctattcaagcaactcgtaaggctactggcatcaagggaagaaagctctttatgccaattagaattgctaccacgcgttcaatggttggacctggtattggcgaagcaatggagcttttaggtaaagaacgtgtattagaacacattgatttaaccttgaagcaaatgagtgctaataatctttaattagataaattgaaaaagaggctgcaaataaatgcagcttcttttttcatctgctaaaataaaaattagttattttgacagaagggacaagtgttagccgtgagagtttataatacactgacgcgtaaaaaagaagaatttaagccattagttccaggacatatcagcatgtatgtctgtggaccaacggtgtataactatattcacattggtaatgccagaagcgcaattgcttttgacaccattagacgctattttgaatataagggttatgacgttaagtatgtttctaactttactgatgttgatgacaagatgatcaacgaagcgagagctgaaaaaacgactgtacccaaattggctgaaaagtttatcaatgcttttttggctgatacgacagcgctaaacattgagccggcgactttgcatccccgtgcaactcatgaaattaatgacattatcacttttgttaaaagcctaattgacaatggctatgcttatgaagtagacggcgatgtttattatcgtgccaaaaagtttaagcattacggtcagttaagtgatcaaaatattgaacagcttgaagagggtgcttcagagcacattaacgatacagaacaaagccgcaaagaagatccaatcgattttgctttgtggaaggcgcaaaaggaacccgatgaaattggttgggattcaccatggggcaagggacggccaggctggcatattgaatgttctgtcatgagtaccaaatatttaggcgatacgatcgatattcatggtggtggtcaagaccttgaatttccgcaccatgagaatgaaattgcacaaagtgaagctaagaccggtaaaaagtttgttaattattggctgcataacggttttgtaactgtcggtaaagatcaggaaaagatgtctaaatcactgcacaatttcgtaacagtgcacgatattttaagggaagttgatccgcaagtactgcgcttcttcatggctagcgtacaatatcgccgccaaattaactattctgctgaaaatttagcacaagcagctacaattttagatcgctttaagaatactgtgactaatattaattaccgtctagcagatgatacagctagtgaagaatcagccgaattagcacaggcgattatggcaactaacgaaaaatttgaacaggcgatggacgatgactttaatgtccaaaatgctttaacagctatctatgatttgttgcctgtagttaatgccaacgctaatgctgctagagctgacaaacaagaattgcaaaagtttaaagagaaattagctagttggttattagtgtttggcgtggatactaataagctttgcgttaaaaatgctggctccaatgacgatgaaattgacgctttagttaaaaagcgtgatgaggctcgagcaaataaagattgggcaactagtgatcaaattcgtgatcaattaaaggaaatggggatcactattcaagataccccacaaggaactaggtggactcgtgactaaaataaaaaaactagcggaagaggatgttaatccggatactttaaatggacaaactttagcctatttaggggatgcagtgtatgaagtaattattcgcagacacctagttaaaggcggtatcgttaaaccacaagtattgcagcgtgaagcgactcactatgtttcagctaaagcacaagctgcgttggtaactaagatgcaagatgaagaaatgttaacggatgatgaattagctgcttttcgtcgtggacgtaatgctaaaagtcatactaaggctaagaatactagcttgaaaacataccaattatcaacaggctttgaagcaatgattggttatcttgatttactggggaaaaatgatcgagtggcagacttaagcaagtggtgtattgatactgtagaagaggacgggctgaaaaattatgacttcaaataaagattttgtctttggacgccatgccggacttgattatttaaaaacacaaagtgccgacaagattaataaggtttttttgcaacacggtgtacaagaagaatttgctaatcaagtttatagtttagctaaaaaaaagcgtttagttgttcaagacgtgcctaaaaataagcttgatcgtttggttgctggtggcaatcaccaaggtctagttttagcaatttctagctttgaatatgcagatttagatcagttgctggacaagtatgatgcagaaggtaaagaaccatttttattaatgttggattctattgaagaccctcacaatctgggatcaattttgcgttcagccgatgctactggcgttgatgggatcattattcctaagcgtcacgcgactggcttaacttcggtagtagctaaaacatctacaggagcaattgattatgtgccagtagcgcgcgttaataatttagttcaaactactaaagaactgaagaaacgcggttactgggtctttggaactgatatggcaggtactgattatcgtgaatggaatgcccaaggcaagactgtactggtaattggtaacgaaggtaaaggcatcgccccattacttaaaaagcagatggatcaaactattactttgccaatggttggtcacgtacaatccttaaatgctagtgtggcaaccggggtattgctttatcaagcttataatagtagaaatccattagtaaaataaacagaaagtagacaaaagtgtgagttttgtctacttttttagatacataaagctcatttctgtccattaaacatgtgttttcttctcaaactcaggggacagtctgtattctttgaggtggaggataaattgaatgattaatgaagagaagctgattaagaaagtacgggcaggagatgaccaagctttagaaaaattgtttcatttatatgagccgttagtaaattcaatcgtgaagcaattctatttgcatcattatgatcgcaaagattgggatcaagaggcaatgattgtttgttatgaagcagcactagttttctcgcctcaaaagggaaaatttagcagtttatataaaactaaattgtttaatcatgcacggaccttggtacgttacaatatggcacgtcgcaggcaaatctatagtcaatcgattccgctagaaaaggcggacattcaaggaagcgtgaatgaaccatgccgctctgaattatcgattccagttgatgagacttacaataattttgttaatagcttgtcacacgttgaattaattgcattattaaccataattggcgagataagtacagagtatgcgattgatcatctaaatattgaagcaatgaagctggtcagagctcgagcacgaactttacagaaaatgcggaaagtgcttttttgatagctgatcaaaagaaagtgcggtataataagtaatgtagaatattttaggaggtaatttaagatggcagacgaaattattaagactgcattgttagaccgtcacatgaaggaagcttttgactggagtgattcagatatgccagttagagatgccctttgggactactttatggaaaagaatggtagagataccatgaagacggaagaagatatgcttccatttttgaaagactcagacgataaaatcgaagccttcgttaacgaaaatcttaagaagtaaatccgactaaaaaacaatgttctacgcaccgtggtcacgcatagttttgaccactaagacagctaccttctccggtggctgttttttatactaaaattaagaaagaattttaaagatgaaatatataattggcatagacataggaactactgcgactaaaggtgtgttgtatggcgaagatggaagtgaagtagctaaattggcaatttcctatccattgattcaggaagaagcggggcaggctgaagaagatccacagcttatttttgacgcggtacagaaaatgatttatcaattaagtcagaaagcatctggtcaaattttggcaatttcttggtctagtcagatgcacagcttaattggcttaggtgaaaataatgagttactgacaaacagcattacttgggcagataatcgtagtagtgatgtagtgcagcgggcaaaaaagtcgggctgggcaagaatgatttatcagcaaacggggatgccgccacatccgatggcgccagtgtataaattgctgtggcttaaagaagaacagccaacactttttgcacaagtaaaaaaatggattagtatcaaagaatatattatttggggcttaactggaaaaatattaactgatacaactatggctgctggcagtggaatgatgaatttaaaaacgctgacctgggatgaaaagatattggctcagattgggctagatcaagttcaattgccgacaattgctgatcaacaatctactgtgggtaaaattattccagaatatcgtgctaaattgggtttaaatgatgaaactcaaatcgttttgggcgcaagcgatgggtatttgtcaacgattggtgtcggcgttttggatgagaaagattttgcattgaatgttggcacttctggtgcggttagagtaattgcaccgaaggcaattgttgatcaaaagaatcgctttttctgttaccctgttgacgccaaacattatttgcttggcggccctgtaaataatggtggaattgtgttcgattgggccagaaaaacaatttttggcccagatgaaacggcagaggacgtcttaaatgtggcacaaactgctccggctggaagtaatggattgttgtttcatccttatcttggtggtgaacgagctccaatttggaatgctcaagcacgtggatcttttgttggcttgacgcgaaatcacactaaaccgcagatggctagaagtgttttggagggaattgtttttaacttgcttggcgcctctcaaggattgcttgatcaagtgggacagcctcaagctttacgtgttactggtggctttgtgcaaagtgattttgttagacaattaatcgcggacatttttaacttaccagtgattgtaattaaaaatgagcagtgtggtaccctagcagctatgtttttagctaaaactgcattagaagataagccagacctggaaaagattaaaaagcgtactgccgaaagccaagtttattttccaaatccccaaaatgtagcgatttatcaagaattgattctcgtttatcgaaaaattgagcatgaacttgaagcctcttatgaagatttggctcagtttcaagataagcatccacagaaatttgagtaaaacaaaaaagacgcattgcgtctttttttcatagattgattaactattaagcattttcaatatcttcaacaatctgatcaactgtcatacgattgtctttcaaaatttctttcaaaggtacttgatcagtatagacacgtttttggccgtagttgagtactttaatatccttgtcgccaaggtaggaagctactttttcaccaaaaccgccgtccaaaatattgtcttcaatagtaacaataactttgttttcttgagtcaatttgtctaaagcggcagtgtctaaaatattagcagaaactggatttactaagctagcacctgtcttttcagccacctttttacctagcatatcgtacatatcacctaacgctaaaacagcaacatctttacctggtttaatgtcgtacttgatttctgaatagtcaacagcagtaatttctttaccttcaggaacatctttggtaggcatcttaattgctacaggatgcttcttttacttaatagcccattccatcattgccttttcttcggctaagttagttggagcaaggtagatccagttaggcaagttagaaatcattacttgatcaaacacacctaggtgagtcttacttgtgccagaaatgccaccaccagcaaccatcattacaactggtaaatcattagcggcaacatcgtgtgataattgatcaaatgcacgttgcaagaaggttgaattttcaaataaaactggagttgcaccttccttagccattccggcagcgaaggcaacggattcttgttcagcaattcctacatcatggtagttttcaggatatttgtttttaattctgtctaagccgaaaacgccgggaattgcggcattgatagccatgatcttctcaccattattgatgtgatcttcaagaacatcgagtgcaatagagctagcggtcggaccttcaggcattgctactgtcgtcttgtcagtctttaaatcgaatggcattacccagtggtgtgcttcttcgttgtcgattgcaggttgataacctttgcccttgagagtgttgatatgaagcaaaatagggtgatcaacatttttaactgctttaaaagcatcgatcattgattggatatcattaccatctgcgacataacggtaatcaaagcctattgcagtaaatggattttctttggtttcaccattagaatcacgtagtttctttaaagcagtaactaagccaccgacgttatcatcaattgacatttgattgtcgtttaccactacaactaagttatgcttttcaattgcagcgttgtttagcccttcataagcaaggccaccggtcattgaaccatcaccaattaaggccatgatgttttcatgtttgcccattaaatcgcgtgctttagccatcccagttgctaaggcaattgaggtagatgtgtgaccgacggcgtaatagtcatatgggctttcatcagggttgctatatggagttacatcttcatagtggtctggatcaagccaagcgagtgcacgtccagttaacattttgtgcgggtaagtttggtgggaaacatcccagacaatcttgtcctttggtgcatcaaaaacatagtgataagcaattgtagcttcaacgattcctaagtcgggacctaggtgaccaccttcagcggcatctttttctaagattagagtcctaatttcactggctaacttttccatttctggaagagataatttttttaaatcagcaggaccagaaattttattcaatagatattcaggatgtttatttattattatgtcctttctaacaagtagttacacttattatagataagcaaaaatcaaaataaaaatatttagttgtaattgagctcgattacttttagtaatgtaaatcagattattgacgtaggaagggacaacagtataaaatactgagtaagtatgtgtttttataaaagtttggaagtgagattatggcagtgaaaaaagcagccttagcctgcagtgtttgtgggtcacgcaactactcaatcaccgcaagtaagaatcgcactcagcgacttgaacttcaaaagttttgcaaacattgcggtaagaaaacattgcataaggaaacgaggtaaataaagctaatgattaagttttttaagagtgttggtcatgaaatgaaattggttaaatggccatccgcaaagcaaaatagacgtgatacagcaactgttattactagttcaattttatttgcggcatatttaggtgcacttgactggctcttcacttggttgactcaaagattaatgtaattgctagcataattagaaattatcagcgattcatgctataatattgacagctaaaagaaaacctctgtgggaggtttttttgtttacctaaaatttaaggagaaaaatatggtcgaaacagcacaaaagaaatggtacgttttgcatacttattcaggctatgaagacaaggttaagtcagacttgttgtcacgtgcgcaaagcatggggatgcaagactacattttccgtgtaatggttccagaagaagaaaaagtagaaaccgttcgcggcaagaaacaagaaattgaagaaaagattttcccaggatatgttttagttgaaatggtaatgactgatgaaagttggttcatcgttagaaacacacctaatgtaactgggttcgttggctcacacggtggtggctctaagccatcaccacttcttgatgaagaagtaacgcgtttgcttaagaatcaaggtcaacctgctaagaaaccagtagttaactttgatattggcgaatcagtaactattactgaaggtgcatttaatggcatggtaggtaagattactgatattcaaccagataagtacaaattatacgtatcagttgacatgtttggtcgtgcgactactgctgaacttgattatgatcaagttaagaagcttgacgaaaacgaataatatttagaatttttagttgtaattgtacccaaacgatgttattctaatacggtacgtttattattgtgggaggagaaaaaaggaaaattctccattttaaccgcatcacggaatcaaggaggttttgaccgtggcaaagaaagttattaacgtagttaagttacaaatcccagctggcgctgctaccccagcacctccagttggtcctgcattgggtcaagctggtattaacattgttggttttactaaggacttcaatgctagaaccgctgaccaaaagggcatgattatccctgtagttattactgtatatgaagatcgttcattcgaattcattactaagactccaccagcaccaattcttttaaagcaagctgctaagatccaaaaggcttctggtgaacctaataccaagaaggttggtaaggtaaccaaggaccaagttaaggaaattgccgagactaagatgaaagaccttaacgctgctgatattgaagctgctatgcgcatggttgaaggtaccgctagaagtatgggtatcgaagtcgaagactaatcctgttatttaggtaacaaattaggtgggagagttaagagaagctcgtttgaccacatatacaaggaggaaatcacatgccaaagcatggtaagaaatatttagatgctgccaagaaggtagactcaaataaattatactcagtagcagaagctatgaaacttgttaaggaaacttcatacgcaaactttgatgctactgttgatgcagcttacaacttaagcgtagatcctaagcaagctgaccaacaaattcgtggttctatcgttttaccaaatggtaccggtaagacccaaaccgttgtagtatttgctgaaggcccacaagctgatcaagctaaggctgcaggtgctgactttgttggctcagatgacttggtagaaaagatccaaggcggctggttagactttgacgttgtagtagctactccaatgatgatggctaaggtaggtcgtttaggtcgtattcttggacctaagggcttaatgcctaaccctaagactggtactgttaccatggatatcgaaaaggctgttaagaatgttaaggctggtcaagttgaataccgtgttgaccgccaagcagctattcacactcctattggtaaggtatcattcactgaagaccaattagttgaaaactttgacgcattacgcgacgttatcttacgtgctcgtccagcttcagctaagggtcaatacattaagagtgttgctgtttcagcaacctttggcccagggatcaagcttgatccattaaacttggactaatttaaaatagactattaaaagcctcgctattgcgaggcttttttctattcattgacctattattttcgaacatggtatcataaattgaacttacaaatctatatattaaggataatgtcatgaaaaagcattctattggaaaactagtcattatgttggtgctaatgctagcttttgttacgggctgtgctaataatggttctaaaatcactattgttggttcaagtgcaatgcagcttttagcagaacaagcaggtaatgattatcgcttaagtcatcaagacagcaacattgtcgtgcagggtggaggatcaggtacaggattgagccaggttcaagctggtgcagtccagattggaacctctgatgtttttgccgaaacacaaaagggaattgatgccaagaaacttcgtgattataaaattgcagtagttggtattgttccaattgttaataagggtgtaggtgtgaaaaatgtttcgcaaaagcaattgaaacagatcttcactggtaaattaacgaattggaagcaactaggtggcaaaaatgaagccataactgtgatcaatcgttctaagggaagtggtactagatctgctttcgaagatataattttacaaggaacaaaaccagttaagtcgcaagaacaggactctaacggtgccgttaaaaagattgttaattcaacgcctggtacgattagttacttgtcctttccttatgctcatgataccaatattcaaaagttgagtattaatggggtaaagccaactaacaaaaatattactactaataagtggaatatttggtgttatgagcacatgtacactaagggtaagcccaacaaacaaactaaagcgtttattaattatatgttaggtgaaaaagtacaaaaagatcttgtacctaagattgggtacctcagtatcaatgaaatgaaagtaactcgtaatagcaagaatcaagttacacaaataggaaaatagttcatggataagaaggataaattaaaggaagttgttgatcaagcaattgctagtcaacacgttccacacgttaaattaaaaaagatgggtccgactagtgttgatattgataaattaaccaagccatctaaagagactcatcaagaatattggggcaagggtttaacttacttggcaattgttttgattattgtcttagttgtctcaattatcggctttgtcggctatcacggcttggctacttttgtcagcgatcatgttaatgtcattcactttttgacttcaactgattgggacccgggtgagggcaagaatcatgttggtgctgcggtaatgatcgttacttcgttcttagtaactcttttagcagcattggtagccaccccgtttgcaattgcaatagctctttatatgactgaatattcatctaaaaagggtgccaatttcttacagtcagtgactgaattattagttggaattccgtctgtagtttatggtttcttgggattaactatcatcgtgcctgtgattagaaaactatttggtggaacaggttttggtattttagcagctacgttggcgttgttcgttatggttttaccaacaatcacatcattaacggttgatagcttaaaggctgtaccaagtcattttagaaaagcttcaatggccttaggttctacgcattggcagactatttatcatgttgttttgcgagttgctacgcctagaattttgacggcggtaatcttcggaatggcaagggccttcggtgaagctttagccgtacaaatggttatcggtaatgccgtcttgatgccatacaatttggtcagtccatcagcaacattaactagccaattaactagtcaaatgggaaatacggtcatgggaactttgccaaacaatgcattatggtcattagcattattgcttttaattatgtctttggtatttaatttcctagttaagttaattggaaagaagggacaaaagtaatatggatgcaaaaaagaaagataaattagctacggcgattatctatattttggtaggaattgttgtattaattttggccggtatcctaggtgatatcttgattacaggtattccacatttgtcctggcgctttttgagttctgaagcctcatcataccaagctggtggtggggtacgtgatcaacttttcaattcaatttatttgttaattttgactactattatctccttaccaattgctttaggagcagcaatttatctagcagaatatgctaaagataattgggtgaccaatttgattagaactacaattcaaattcttagttcattaccatcaattgtagttggcttatttggttatttattgtttgtagttcaatttggctttggtttttcaattatttctggtgctttagctttgaccttttttaatttgccaattttaactagcaatattgaagaagcaatcaagggcgtcccacaagatcaacgtgaagcaggattggctttaggattatctaattggaaaactattcgcgggattgttttacccgctgctcttcccggaattttaactggaattattttgagtgcgggccgaatcttcggggaagctgccgctttgatctatacagcgggacaaagtggatcaacagtcaattatgcggactggaatccatttagtccaactagtccacttaatgtaatgcggccagccgaaacattggcggtccacatttggaaagtaaatactgaaggaattattcctgatgccacgattgtttcagcagctacttcagcgctcttggttattgtggtaatcgtatttaatttaggtgcacgttatttaggcaataaattgtaccgcaagttaactgcagctaagtaggtgaaataatgcaagatttaaaacctagctatattaaaacttttgcaaatgatgatttggaattatcaactgaagatttaagtgttctttatggcggtaaggtacaaaaattatttgatgccagtcttcaatttaaaaagaacacgattacagctttgatcggtgcttcgggttcaggtaaatcaacatttttacgttcattaaatcgaatgaatgatcgagtagcaactgttaacggaaaaatctggtttcatggtttagatgtgaataagcctaatatcaatgtttatgaattaagaaaaaacattggcatggtttttcagcggcctaatccatttcctaaatcaattagagaaaatattgtttatgctttgaaggcagatggacataaggatcgggcagaacttgatcgagttgtagaagaaagtttgcgtgcggctgctttatgggatgaagttaaagataagctggataaaagtgcattagcattgtcgggtggtcaacaacagcgtttatgcattgctcgtgctttagctgttaagccagaaattttactactggacgaacctgccagcgctttggatcctgtttctacttctaaactggaagatacccttaagcagttgaggagtaagtatactatgattatggtaactcacaacatgcagcaagcctcaagaattagtgattatactgcattcttccatttaggacatgcaattgaatataattcaacggcagagatctttactaatcctaagggtaagattactgaaaactatattcagggaagttttggataaaatgacaacaataatttcagcaaaagatgtacatctaagttatggcaattatgaagcactgcacgggatcagtcttgattttaagaaaaaagaattaacagctttgatcggtccaagtggttgtggtaaatctacttttttacgctgtcttaatcgaatgaacgatgacatcgaaaacattaatatcacaggtgaaatcaagtttgaaggccaagatatctataattctaaaatggatttggtcagtctacgtaaagaagtcggcatggtttttcaacagccaaccccattcccgttttccgtatatgacaatgtggcttatggcttaaaaattgctggtgttaaagacaaagagctaattgatcagcgggtagaagagagtcttaagcaagctgctatttggaaagaaacaaaggacaatttaactagaaacgctcaagcattttcaggaggacagcagcaaagaatttgtattgctcgtgcgttggctgttagacctaaagttgttttattagatgagcccacaagtgcgcttgacccaatttcaagtagtgagattgaagagacactgatggaactaaagcatcagtatacttttattatggtgactcacaatttgcagcaagcaggacgaatttctgatcagaccgcctttttgatgaatggcgatttgattgaagctggtccaactgaagaaatgtttattgcacctaagaaacaaatcacaagtgattatcttaacggtcgttttggttaaaattttgaggtaaaaagatgcacgaaatatttttggatgaactgaaaaaattaaatacacaatttatggaaatgggtgtcctcgtcaacgatgatattgaccatgctacccgtgcttttgttgatcatgataaaaagactgcgcagtcaatggttgatgatgaagaaaagattcctacagaatcaattaatattcaaaagcaagccttaaaattaatggccttgcagcaaccggtagctactgattttagagttgttatcagtattttaaaggccactactgacttggagcgaattggtgaaaatgctatgagtattgctctggaaacaatcagagtaaaaggtaatcctcgtattccagaagttgaagaaattatttctaatatgacacataatgtgcgacatatgttaattcaagttttaactgcttacgtgcaagatgatgaaaaaatggcacgtgaagtggctagtcgtgatagcatgattgaccacgactatgtaagagctcgtcaattgatcgttgatggaattgaagatgatccttcgcgtgcaatggcttcatcaagctattttgtagttacccgtttacttgaacgaatcggtgaccacattgttaacttggctagctgggtggtttataaaactacgggtgaactagaagaactatctaattcaactgaaagtgaaacgatttaaataaagtaccgtaaaaagcggtgctttttttgtaataaaaaacagttgatacgcgtggtgctagttaaatcgttctagacaatatgccatattataagctaaaatagctatttctagccgctgttgaaagcctactggacttcttgctcgattattctcagcgttgtaataactaagcaaagaaaagtcgctttcaatgctttttctaattgccatcatcgcttactattgcgtggaccttgaagccataataatagactttcttggttgctttataaccaatatcagctacgccccgaaagatcttgacacgataattgcaaacaggctggcaaactggcactgggaaactatcaataatcaaaaattctccagctgtctttacttcttgattccaagcctgacggatacaacgaattagaggcaagagcattcgagctcgacggttaaaacgagaatgagataagccaacgaagaatttacagaatcttcgttgagattcaattccaatttcagtttgccaaatgagcatcgctaagatagaactatcaggaagcttggtctgatcaacatttttacgatgtttaagtccatcaggcgcataaagcttatatagcgagcgacaaatcacatttaaccgattaaaactaacttgtaaatggtgagaaaaacgcttaagcttgagatagttcaattagatcagactcttttctatttaaattacctacaacttttattaactaaaacgatttaactagcaccacgcgtataattaatgaatatttcaaaaactgtattggcgttataccaaacaattattggtgaaaaacagaaacgcttaatcaagacagtagatgcttatttggacattaactacggtgataaagtttatcagataattgatcaagttaaggaacgtaatattccaattttgtcttttggggatatagcagatcaaaacaatacttactcaaactacactgtttttggcaatgatcaagttgacgagatggtggataaaattaatgaaatcatcaataaccaaaataaataaaattatcttttgcattttacagcaaagcttgctataataattaactgtaaattctacctaagactcgggtggcatgacgcctcaaaatcccgccgaggccagaagatgatgaagatttttatgctccatgtctttcggcatggagtttttgcttttttaaggccttatagaatttatcaatgtgatcatggaggtgaaataatttgagtaaagctgctattgctgaaaaagaaaagttcgttgatgcatttgctgaagaacttaaagctgctaaggcaatcttggtaattaactaccttggtttgactgttgaagaagttactaacatgcgtaaggaacttcgtgataacgatgttaagatgaaggttatcaagaacacctacttaagacgtgctgctgctaaggctggtatcgaaggtcttgatgatacttttgttggaccaactgctgttatctacactgataacgctgatgacgttactgaacctgcacgtatcgtttctaagtacgaagatgactttgacgttatcgaaattaagggtggtatgcttgaaggtaagttgacttctaaggatgaaatcaaggaacttgctgctatcccaggccgcgaaggtttgctttcaatgcttgtttctgtattacaagctcctgtacgcgactttgcatatgctgttaaggctgttgctgaatctaaggatgaagactcagctgaataataaagaaatttatatttaatatctaaattctaatttttcggaggatacttaaatggctttagatactgataagattattgaagaattgaagggtgctaccatccttgaattgaacgaccttgtaaaggctattgaagacgaatttgacgttactgctgctgctccagttgctgctgcaggtgctgcagacgcaggtgctgctaagtcagaattcgacgttgaattgactgaagcaggtcaagaaaaggttaaggttattaaggcagttcgtgacattactggtcttggccttaaggactcaaaggaccttgttgatggtgctcctaagaacgttaaggaaggcgtttcagaagacgaagctaacgacatcaaggctaagcttgaagaagttggtgctactgtaacccttaaatagttacagcccaactgggcaactatgaataagctctttgctatgtgcgaagagcttatttttttgtataattaaatttatgatgaaagatatagaaagaagactaacgccatatcaatgggtaatggccattttagctattatttcgatttttttgattattttagattttgctgcggttattaatattgatgaaccgactagtaaatggttctggatcaatagtgcaattgtagtatattttgcaattgattatttttgtggcttacatgcagcagaagacaagaaactatatttcaaaactcacatttatgacttgctgagtattattccaatggggttattgtttatcagcttaaatatttttaatttatctgggctggtatcagatttgcggcttttgcgtttgattcgattagctggtttgatgggaaaattacgtaatatttttcatactaatggcctactctatgtaatcttttttacaattacatttttgttggtaggagcggaagcattcgcaatcactgaacatgtaacgctggatactgctttttggtgggtcatttcaacagcttctactgtcggttatgatgcaatttttggcaaaacaattccaccgcatagtattgtaggaaaattcgttacattagtaatgatgcttttaggaattggaatagttggtatgttaacgtcatcgattacttcgtatttgatgaggagaacgaatggcgcgaatacgttaaaaacgcatgataatattcaattaattttgaaaaagcttgataatttagaaaagcaaaacaaggatttggctgatcaaaacaaaaagatgcaagcacagattaatgaattgaaagatgtacagaatacaacggagctgcataagataaaagaatggtttgagaaaaagaaaggttagttaaaatgagtgaagaaaaaaatcaaatgtattttgcgactgatcctactgccaagcatgatcaacatgttgttgattatcatgtggataatattgatttgaaattcacaacagacgcaggtgtcttttctaaaatgagggttgattatggctcaggcgtattgatcaaggcaatgaaagatgttgtttttcctaaggataatatcttggatgttggtaccggttatggtccgattggtttatttgcggctaagttttggcctgatcaaactgtagatatggttgatgtaaatgagcgtggattaagcttggcaaagcagaatgcacaagttaatcacatagataatgtaaatatctattcctctgattgttatgaacatgtggataatgataaaaagtttggtctaatattaacaaatccgcctattagagcaggaaaaaaagtggttaatgagattttactgggagcaaatgagcatttggttaatggcggtatcttattagtagttattcagaaaaagcagggagaacctagtgcgcgtaagctgatgaccaatacatatggtaattgtgaaattttaacaagagataaaggctattatatcttaaaatcaactaagaaataactaaataaaaaatgcttgaaagtactattaaataagcattagactttataaaagtgctttcaaaactggatttatcctcgtataataatcttgtaaatatcaagagtatgtgaagaggataattattatgaaaaaggcttggaaatacattgttgcagtattgattgtaattgttggtgtgtttatgttaggtatgatttccggtgataacgagactgctgctccagctggaattgctgcattatacttgatcttgtcaggaatctttttctaccacaactttagaaatcgtaacattgaaccattgtaaaaagtaagcagctagtcgcaaatcaatgtcattaagttaagacattgacattatatcgacagcttttaaagatcgaatcattttgattcggtcttttttctttttaaaataaaaagtgagcagagtttatttgcctttctgctcactttcgtcatattatctggtctttcatagaaagctgtgcctcttatgaaatcccttcactcaaatattttaaagctgatggatagtattatcaataaaatcgctgacaacattcacgatttctctgtatctgatcaagcttttactcgctgtcgtaagctcaattccactgatttgattaagttaattcttaacatgggagctggcagcctgaattcggaaatttttcatgcttttcctgacataaattctagaatgactgcttcggcttttgaacaacaaaaggctaaattaaagcctgaatgctttaaagaaattatgttagaacttagccgggcaaataatgtactgcaattattagataatcaatacttagttgttgcgattgatggctctgattttgatcaaccttttaatcccgaatcagaaaatatttttcgaggtaaagatggtcgaatatactgtcaacttcatgtaaatgctctttatgatgtcttgaataaattatatttacttaaacttcccacactaaataagccagtaatctcttgatcttgcttggctttaggcttctatattatttttgctagttttctttaacaatttttgcatgtatttgggtaaacgattgataaagtcagccgtgaattcagctatttgtgcttcactggcatgaaagacttgctttacgctggccagcattgcatcagtaatcaattgcaaggaatggctaaaagtaatgtccgccagctcatcaatcatgcaatagaacagctcgcctagcgtgcgttcatcttcatcgtcccgcttggcaactgacataagcatgtagcgagtaaaaactatggcaacatgagcggtcaaagcatcgtaagacaggccatgatattccgtacttagttttagataacttttgcaagttttgaaaaaaacctcaatatcccaacgcttgccgtagttgcggataatttcatcttcgctaagcgacatgtcggtacaaatgattgccagccaatccttgcgattggcacggtttctaacgcagacaatccgtgcatctattttagcaccgtctttgtcctggcgtccgactttgactgggattgacagcaggtagcgagaacggccgcatcgctttttacagctgcgataaatctgtttgatgtttttgcgttctccctcaaattcatatttgattttggagctcaccttaaccatggcaatcacatccagcttcctttgcttgagctggacgatttgatgtggatttgagaaccagctgtcaaacagcacgtacttggcttgatgacctgctttcatagcttggtcgattaaattaaccatcacgtctgtgcctttagtccgggcaagcatacgtctttggccagcaatggtgcgctgatcaaaaactttattttcgccaatcatattctgtagcttctgagaagacagcagcactgaattgattggcatgaaagaagctccatcagtccagcccagggtcatcatgcgaaaacctttcttgtaagtcattgatacatggtcaaaaactttggcgactaattctgttttcttgaagccggtcctagagaagtaggaatcatcgacaacaaagcaatcagcccgtttttctgaagtcaaagatcgcaagtggttattaatgatttgcgcagacagacgtgtggtgaagtggagccaattgacgtgaacgttgcgcataaaacggtaatatgagttcttggaaaaattttcttgaaaatgatccattttcagctgcatatataagctgcggtcacgaaagacattgcttaaaacgtaaagaaacaagctgaacaggctaatgcctttttccttgcggaagccacattttctcaacagcttgatcacctgaaacttcttgatgaagctgatgattgagtttgaaaatagttgttcattttgttggtcaggagatggtaaaatagacattggcacaagcctttcatgcaaataaattatgttttggtcaatataattatagcaatgaaaaggacttgtgccttttatatttgtcaaaacacgcagaatcacaatgaaacaagcaattttgcgtgtgggaagtttaagtatttagacatggttatccaacccagacaaaaaatggatgaacgtgaggcagccttaactatgttaaagaaattagcccaacaagaaaaagatttcttagtcctgatggatcgtggctatattagctttaatttaattgaaaattgcaatcgattaaaacattgccactatgttatgcgatcaaaatccggagatggtgcttttaaagaaattgtagctatgtcgaatcatgaatacgatattgacttatcatgcagagtaacttcgtcacattattattatgtcacccataaagatacagaaaagtttcttcacctgattcttcacaaaaagcatcactataaagctgttcgttcaaaaaataccagagatcaacgctgggattttgaggatatgtgtgatgttagatttagagtttgtaagtttagaatcaatccaccaggttcagacgatgagtgggaagtcctcatcaccaatttatatcgaaatgaatatcctctagctagaatgaaagagatctatcatcttcgctggggaatagaaacttcttttagggagcttaaatatgacttaagcggcatacagtttcattctaaaaaagatcaatttgtttatatggaaatatacgcccattttgcaatgtataatgccgtgagtttatcaataattgcgagctcaaaaccgtatactcagggaaaatatcaatatcaaatagattttaaaatggcctgttgtatctggcgacgatattttagtataagtgataattcagataaaaacttcacacaattactgctggatgtggcattttatttaacgcctattcgaccaggaagaaaagataaacgaaatctaaaagttaaattagtagttggctttccttatcgtctagcagcttgaactaatttaaacgactatcttaagatggcttatttgtgctatcaaaaaagacatttatcgaataaaataattcgataaatgtctcaaaaagtgtcatcagattagtcaatgtcttaacttaatgacattggtcgcaaatagctgcttttttgatacaataaataaaaacgatgaattgagaagtgataaaatgctgtctagcgaagataaaaggaaatacatgcaattagccattgaccaggcaaaagaagctgaaaagcaaggagaggtgccgataggggcagttgttgttgatcctgatggccgcgtagttggtactggatataacaggcgtgaacttgatgaagatgctacccaacatgcagaaatgattgcgattaaagaagcttgcagtaagttaggcatgtggcgcttaattgactgcagcttattcgtgactttggaaccatgcccgatgtgtgcaggggcaattattaattctagaataaaagacgtttatttcggtgcacttgatccaaaagccggagcttgtggatcagttgtggatttatttagcgtagaaaaatttaatcatcatccgcatgcaattcgtggactgtatcgtgatcaatgtgcacaaatgctaaaagattttttcagagcgattcgtgagaaacaaaaagcagctaaattagctcaaaaagaagtataaaatcagtaatttttaaaacaagatgctggtaatatttactgaaatacgttaacatagttgttgggcaatgtttgacctctgaattgtgtcaggaccggaaggtagcagcactaaggttgttcaggcatgtgccttttttgttagaatattaacagctcttagctcttcgagagctaggagcttttttacttaggaaagagaatttatggcttatcaagcgctatatcgtaagtggcggccgcggacttttgacagtgtgattggtcaagaagcgattaccgataccttaaaaaatgcgattaaacgtggtaaggtttcccatgcgtttcttttcgcaggaccccgcggaactggtaaaacatcttgtgctaagatttttgctaaggcattgaattgtactaatttgcaagatggcgaaccatgcaatgagtgtgctaactgtattgcagctgatcaaggttcaatgccagatatcatggaaattgatgccgcttcaaataatggggttgatgaaattcgtgaaattcgcgataaggtaaaatatgctccaacggaaggtaaatacaaggtatatatcatcgacgaagttcatatgttgtcgatgggagcttttaatgctttgctgaagacattagaagagccaccagagcatgtagtatttattttagcaacgactgaattgcaaaaagtgcctgcgacaattatttctagaacgcagcgctataattttaagcgaatttccaaagaagaccttgagaagagaatgaaatacattcttgatcaagaaaatattaaatatgaagataaagctttagcagtcattgctcaagtagccgatggtgggatgcgggatgctcttagcattttggatcaactgttgagttacgagaaggaaagcgtcaactatgatgatgctttgcagattacaggctttgcagatcgagaaaatattgaaaaaattcttttagctttgttaaatcaggatgcaggtcaagccttgcagtttacacaagatgagttggctaaaggagctagttcaaaaaacattttagatgaaatcatcgatctaactactaagagtttattaatcgtcaaaaccgatgaaaataaacaggaaacttttttaacaaaagactttattgaaaaaataaagagcgtttctacagatagttattatcgattgattaatttggctaataatgccttgaatgatttacgctatactaatcagcaacagataccactggaagtgttcttagtagaagcaagtagtactgcaccagtgcagataagcgctgccccagctaagacaacaccagctcaacctgcacaaggtaatactgatttgcaggctgaactagcagcgctgaagaagcaagtcgttgatttaacacaaaaacttagtgaagtatccaataagccaagtttatcaacaaatcaggtatttcacttggatactgcggtacctaaagtggctcctaagcctgctgttaaaccaaaagagaagcaaactaaaaagccggttagaaaagtcaaaaaaactacggcagaaaatcgcaaacaagtatatcatgttcttgaaaatgctactcgaaacgatttagagacaattaagaatgtctggcctgatttacaatctgttttagctgtctctgaaaaagcactgcttgatgtattagaaccagtggctgctagtcctgaacaagttgtcatgaaatgcaaatatactttatggtttgaaaatgcgagcgcagataatgatctgttagggcgcttaacggactatattgaaaagtttgctaaacattcttacggcattgttttggtgccagataacgattggctggcagttagaaaagaatttgttgaaagccataaggatgagctacttgctaagaaaaagcaacagattgagattcaagaagaaaagtcagatgaaccagaagttgatccagaagtgattaataaggcaaaggatctttttggggatgcagtcaatattaaagactaaagtactatgagcaatgattataatattaaagttttaaataaagaaacaacattacagatcttactagaagatcataattctttgattcgttttggagatggagaattagatttaattagaggagcaagtattccgtatcaagattatcaaccggaattagctggttcgctaaaagagctcctgttagaaggcagcaatcgccgtttattagtaggattatctgatgtttttgaaaagttagatcgctataatgattattgccgtaatttttatcaaaatagtttcttcccgaataatcatgacttgttaagagaagttgaattgcaatacaatgtatacgtttctactttcttttcacggccatatattgatttagtagataaaagtcacgctaaagattattttgctaaaatgaaacagctttggcaggatcatgatcttttaattgtagaaggtaaatatagtcgctcaggcgaaggcatgacttgttttctaatgctagatcaattagtagactcatttgtccgccaactaatgcatatagtcgcaaaaaagttattgaagatgaaattattaaaaatgcagctaataggttgattttactgatgttaggtcctactgcaaaagtgattgtggctgatttgatagctcagcttaataatcaaatgattgatatagggcacatcgattcagaatatgaatggatgaaaatgggcgtaactaataaggtgaagataccgcataagcatactgctgagtttaattttgatgataaacaagttaaactagagaaagacgacaattttgataagcagattattagtataatagaataataaaggagaaaaattatgagtagaagacctaattttggtggtatgggcatgggcggcatgaacatgcaacaaatgatgaagcaagctaagaagttgcaagcacaaatggcagaagagcaggaaaacattactgctcaagaatttactggtaagtctgccgatgatttagtagtagctacctttactggtgaccgcaagttgaaggacatcaagattgataaggaagcaattgatccagacgacccagatatgttacaagatttggtaattgatgcggttaacaagggcttgaccaaaattgatgaggcaactcaggcaagcttaggtaaatacacgaaaggtttgatgtaattgcaatatccattaccaattgctcatttaattgatgcttatatgaagctacctggaatcggtgaaaaaacggcgactcggttggctttttatacgatggatatgcctgatcaggatgtcgatgattttgctaagtctttagttcaagtaaaaaaagacattcatcaatgtccgatctgtggcaatattaccgaaaaagatgtctgtgatatttgctctaatcctaatcgcgatcaaacaactattatggtagttgaacaaccaaaggatttgatggcttttgaggaaatgggcgaatatgacggactttatcacgtgcttcatggtgttctttcaccaatggatggaattggaccagaagagatcaatatcaagtctttaattacgcgtttgcaaaaaaatgatgctgttaaagaagtgattttggcgcttaattcaactccagaaggcgaatcaactgcgatgtatatcagcaaattaattaagccagctggtattaaggtaaccagattggccgctggtttgtcagttggtagtgacattgaatatgctaattccattactttaaagcgcgcagtgcaaggaagaacggcattataatggctaataaaaagcaagcaaagatcaaagcaatgggtgatcaaaagttggtagccgagattgaaaagctacaaaatcaaattgcattagagcaagatctcgatcaaacaactttagatttatccgaagataattatgtgcaaaatcgaatcttaaaggcaaagtatacttttttgtataatgaagctcgtcatcgaggcacaagatttagtggtattactaatgctattacccagtagaaaaagaccgaatattggtctttttttattttgaataaataaaaaatagtaggactgttaatctctatgaaacttctgtagaatagacatatggaggattttatgagaggttattttgttagttttgaaggccctgatggcgccgggaaaagtacagttttaaaagaagtattgaaccaaattggttcagagcttaagacacaatatcttgtgacgcgtgaaccaggcggttcaaaaattgcagaaaaaattcgcgacattattttagatcctgctaacgacaagatggacaataagaccgaagcgcttttatatgctgcatcacgtagtcagcatgtggaggagattattcgtccagctttaaaggaaggcaaagtcgtattttcagatcgctatgtcgatagttctttagcttatcaaggagcgggacgtgatttaggaattcaggaagttaagcaaattaatgattttgcaacggataaattagatcctgatcttacttttttcttagatcttgatcctgaagtagggttaaaacgaattgaaaagctgcgtccgggtcaggaagatcgtttggaacaagagaatcttgcctttcataaaaaggtttatgccggttttctcaaggtaaaagagacgtatcctgaacgcttcgtaactgttgatgctacgcagccaattgatcaggtagttgctcaagttattgcaacattaaagcaaagaatgccagagttattttaaggattgatttagatgaagttagtaattgcaattgtgcaaaaagaagactctaatgatttacaacgggcctttgttcaaaatgattttcgtgctactaagttagcaacttcaggtggttttttaagtcaaggaaatactacctttttagtaggttgtgatgacgataaagtagacgatgtattaaagattattaaggaacagtcccgagcaagagaggaaattgcaacaccacatatggtttcaactgggtatgaaattacacagcctttgaaagtgacagtcggtggtgcaacttgttttgttgttccagttgatgagtttaaacgcttctgatgattgatcttagtaatgttgggaaaaagcaaacccaatttttaaaaagagcatatgaccaaaaaaagttagctcatagttatctttttgttgatagcgatgaggcacgggcattgaatactgcatactggctagcttgtttgtttaattgtactggtgaaaataagccggatggcagctgtcaaaattgtcggcaaattttgtcaggtaaccacccagatgtattgctagtagcgcctgatggaaaacaggctctagggattgatcaaattcgtcccttaaaagaagaattagccaaaagcccagttgaaagtactcgccgtttcttctttattaatgaagcacaaaagttaactttagctgcagcaaacggtttattaaacttactagaagaaccagtagcgccagtagttacgattttgattactaacaatagtgatcagattttaccaacggtgcgttcacggacccagatcattaattttgacaatggtgagagggctagtggtaggactgcagtcttactggagaatggtttttcaaaagcagagattgaggaactgggtaatcttgataaatggaatcaggcaattaaatatttttatcaagaaatgctggaacacaacagcttagcacttgtcagtgcacataagctagctgctgatgctaagctagtgtcagagcagggttacatcttgcttcagttaaaattattggccgagcaagatttgcgtaatcctgctaaaagaataatggcggcgacaatgcttaagaatttaattgaaatagacaaaatgcgtttgagtaacgtaaatttacaaaatgcgttagattatctcgccttaaaatggaagtaggtgtttagattggatccatattcaaaactgaaaaagattgaagaaacaacagaaaatatgaccaagacgattgccagcttggaaaatgatattttagaaacattaaaagaaaacacggagttgaaggtagaaaatcaattactccatgagaagctggacaagttaacggcaaatcagcctgcacctgagactaaaacgcagagtggcttggaatcattgaagaagatttatgattcagggtaccacatttgcaatatgtactatggctcgcatcgtgatccaagtgcagattgtatgttttgtcttgatattttggacaattttggcgaaaaaaagggcaagaaaaaggacggtagataatgaaacgtcaaagcagttatgcaaaagatgaaggaaagctttatttagtgccaactccgattggtaacttggaagatattactattcgcgctaaaaaagttttaaccgatgcagattatgtagccgcagaagatacaagaactagtgggattttactggaaaaaattggggttcataataaaatgatctcttttcataagtataattccaaggagcgggcgccggaattgatcaagttgatgaaggaaggtgctgtgattgccgagattagtgacgcggggatgcccgtgatttctgacccaggttatgtattagtacaagaatgcattaagcatgatattccggttgtaccacttcctggtccaaatgctttttcaactgctttgattgcttccggttttaatcagccatttacttattatggctttttaccaagaaaatcatcggaacagaagacctattttgcacagatgcgcgataatagagcaacatcaattttttatgaagccccgcatcgtctagcaaaaaacctcaaaacattggctagtgtgctgccaaaagatcgtcaaattgtagctgcacgtgaactgaccaaaatccacgaagagtttatccggggtagtgtggaagaagttacgaattacttcaatgagaatgctccacgcggggaatttgtgattctagtttcacctaatacagaagcgcctcagcaactatcttggacagaattaattgacttagttaatgacttggttgaaaaaggtgaatccaagaaagatgcaattaaacaggtagccaagcagcatcatgtttctaagaatgaattgtatgatcaatatcaccaggattaattatgaagtataccgaagaatatcaaattgaatttaaagattgtgacgaaaatcggcgtttaaaattaccagcactagttgagttaatgatgcaggtttctgagcatcaattaagtcaaggtggtgctgggactgatgacttggttaagcgtggtctaggctgggtcgttactcaatatcattttgagattaaagacctgcctaaaccgggtgatcaagttattctaagtactgaagctagcggctataatcgtttttttgagtatcgtgattttggcgttagtacgcaagacggtaagccattagtgactgtaaaaagccagtgggtaatgctcgacttgaagaagcggcatatggtgccaaccgatactaaaatgatggaagattggggtgcaccactacttaaaaagatgccacgttttccaagattgcgtccgcaaaccgaatacgagcaaaagcgttcataccgtgcgcgttacgatgacttagatactaatcatcatgtaactaatagtcattatttcagttggtttgttgatatgttggatcgtaactttttaaaagaacatattgttacagcaattgatattaaatttgataaagaagttcattatggtgagagtataaattcttgcatggacttggttcaatatgatattattattacatctcatgcaattgaagcagaagatgggacagttaaggccgtctgtgaattaagttggcgtgagatatagtaacaacatgacgctattagttgtttttatttaggggaggaatcggtcaaatgaatacaaagaaaattttacgaacggatttacagcaactagtctttttaggtattgttgttgcaatgaaaattattctaagtcagttttcttttggtccagtaatggttaaagtgggactgggtttcattgggagtgtgctattaggatatctctttggtccgctctggggaacaattggcggtggaattagtgatttaatttcatctgcactttttggcgatcaaggtggctttttcattggttttactttaacagcaatggcaggcccatttatctacgccctgtttttatataataagccagttaaaatttggcggattattgcttctactattctggtgactgtaattgtcaatattggcatgaataccttatggctacatattatgtatggtatcaatttcaatgcggctttgatccaacgtttacctaaggagatgatcgttccttggattcaaatggttatcagctactttgttttacaagccgtttctcgtgttaaaataaaaaagtgatttaaagcgaaaagagaaaaatgtataaaatgaaaattttaagtgtttcgacagctactaatcatttgagcgtggccttgaatgatggtcaacaaattattgttgagaaaaatgaacgagatgagcgtaatcatagcgaacatcttgatccttggattgatgaaatcttaaaagataatgatttaagcttaaaagatattgatcgttttgcagttgctattgggccaggttcttatactggactaagaattggaatcactactgttaagatgtttgccagcattttagataaagaggttgtaggaatctcaactttacaagctttggctaaaggcgttcaagaagacgctttggtaattactggtttagatgcaagaaatgacaattattttgcggccggttatttaagcggtgctgtaccagagaatgtcattccagacggtcattacaatatcgacgttttaattaaggcgattcaagattatgcggccaagcatgaagttaagaaaattgtttttgtgggctcaggtcttgaaaagcaagatgaaaaatttaaagctttgaatattccatatgtttatggaactgaagaagagaatgtcatccatgctgggctaattggacaattagctgaaaatgcggttccagttgatccagataaattattgccacgttacttgcgtcgaactcaggctgaagtagactggcataaaaagacaggcaaaccattcgagccagatagtcattatgttgaagaagtttaatcaatttttccatcaacagttaaatcggattgatatgagttttaccccgtttattgcgaatgtaaacggtaagagactacaaattatgcaagctacagatgacaatattcctgacctgcttgtattagaggagcaagtttattcaggtcggacaccgtggaataagttttcatttgagcgagaactagagaagcggcataattgtctttatttggtagtgtattatgaatcgatgctagttgcatttattggtgcgcgttttactccagaagagacgcatattactaatattgcagtagcgccggcttttcaaaatatgcatattggtcgttacttaatgcaattgattattgatcgggcgcgtgaaaatgacagtgattgcgttagtctagaggtaagagtagataatgagattgcccaaaagctatatcgttccttaggttttgaaggtaccttcattcgtaaaaactattaccatgatactcataccgatgctatgaacatggttttatggttaaaaccacatcagattaaaagaaagaagtttacgttttgagtgaaaaaaatgttcgcattttagcttatgagagttcttgtgatgaaacttccactgctgtcattaaaaatgggcgtgagattgaaagcttaatcgtagcaacgcagattaagagtcatcaacgctttggtggtgtagtccctgaagttgctagtcgtcatcatattgaagtggttagtcagattactaaagaagctttggctgaagctaattgtacttggaaagatatcgatgcaattgctgtgacttatggccctggcttagttggtgctcttttaattggtgtaagtgcagctaaggctgcttcaatggcaacgggtattcctttgattggtgttgatcatattatggggcacattatggcagctcaactaaaagatgagattgaatatccagctcttgcattacaggtttcaggtggacatactgaaatagttttacttaaggatcctgttcattttgaaattatcggtgatacgcgcgatgatgctactggcgaagcatacgataagattggtcgtgttcttggggtaaactatccagcaggtaaaactatcgatgcctgggctcatgaaggcaaggatacctttaacttcccacgagcaatgatggaagatgatgactatgacttctcattctcaggtttaaagtcagcttttattaacacttgtcatcatgctgatcagattcatgaaaagttgaataagtatgatctggctgcaagttttcaagcagcagtaattgatgttttggctcataaaacaattcgcgcaattaagcaatataagcccaagacctttatcatgggtggtggggtagctgccaaccatggcttacgtgatcgcatgagtgcagaaattgctaagttgcctaaagcagaccaacctaaggtgattttgccagatattaagttgtgtggtgataatgctgcaatgattggggctgctgcgtataatctttataataatggtcaatttgcggatttgactttgaatgctgatccatcacttgaattgccatatgctaagagcatgttgaattaaatagaataactttttaaatcaaatacctagaacgattatttctaggtatttttttctactaaggcatggtccttaggatcttttaaatctaaggcgattgattcgtaagcgtcaaataaaatagtgtacttaaaaaccgtcccagttactgttatactgagacggttatttaagttcttttatttacaatttatctggatcttctcttgccacggtaaataagcttcaagggtttccgaatccagaatctcttcattcggtaatttctgaagcaaataattcaagtacttttcaggatcaaggccatttctcttggcagtttcaattaagcttagaataaagccacttgcagtagcaccctcaaaactttgagaaaataaccaattcttccggcccatgacgagtgattttacagcgcgttcagccttattgttagataattctaaattgccatcaagcaagacatgctcaaaagtagcttgatgcttgagggtataattaatggctcttcccaatttagagcctggcaaaacggtgattttatttttctcacaccagttgaagaactcttgcatcagaggcttgagctttgcttgtcttagctggtaacgttcttgtttgctcaaattctcccaggtttgttctaagtaaaacatgcgattgcagtagttgagtcctttttgggcaagggacttttcagaagcctgttgtggtacggcttcgtgaaactttcttctaacatgagcccagcagccaactaaagttgctttcggcaattgctcataagcctgccacatatcacagtgcaaataaccgggatagtttcctaaaaagtttaaggcaaccttgcaactccgggaaggatcatgatgatagagtgtaatcccgtattgatcatgtttgcctgaaaggaagacccaatagtaagtcttgattgttttactttctaagactgtataataagtttcatcggcatgtaaaattggccgcattaacagcttttgcttaagcagatcatacactggtttaaagtagtattgactgcttttcaaatcccaataatttaacatctgtcttgaaacttctagtcccatcttcttccagtcgctttcttgacgatagtccggcaccttcatttcatatttttgataaagtgaatgagcgatgagtgaagctgaacctagaccatggtttagggggagctttaggtactgcagctttaatgatcttgtcgctaagatttctttgactgcaatatttacatttgtaagcatgttggatatggtctaaccttttaagttgagctgggataaacaataattcttggcgaactgactgcttgcctatctcaatcagttcatgatgacaatcaggacaatgcttgtcgcctaattcatggtgaacctcttcagctggaagggcagctagtaagtcagcacgctttcgtttgtgagcttgtcttttataagtaatagtctgaacggcggcgtcggggacgttctccgtcatcttgagcatcaggttcatcaaagagacttgtttgtccatttaaaggcatttgttctgaagatttgccataacgtttttgcgttaagtaagctacttgttcacggaggagcttaatttcatcagttaagttttgaatagtagttgcttgttgtgcaataatcttttccaaattttcttgtgacatgagttaaacttcctcctaaatttattagttaaaagaatatcaaaaaagcgtgcgatgtcaagtgttagtagaattcgcacgctttcgtgttctttatttttggattgattgcgaagcccttcattagccagtcgacctgctcagaagataaagcttgaacttcattttgattcctgggccagttcaattttccattttcaaatcttttgtagagcagccaaaaaccttgtccgtcccaataaagggctttgaagcggtccttgcttccgccgcaaaagaggaagactttgccgctaaaaggatcaagttcaaactgttctttgactaaagttgctagtccatcaatgcctttacgcagatccgtcttgccgcaaacgatatagacttgccctaagtcactgagcttaatcatggcaagactttctcaagcagcttattcataatttcagggtctaagctgctgtaaaaattcagctctaagtcattcttctttaaactaagcaacagattattgcgtggtggacgagccttcttaggtttagaagaacggccaagtgccacaatgggttgttgtttttcgatcatattcttaacctccattaaattgatgagattagaatacctgaaaaatacggactaaaaaagatactcggttatatgacgcttacattgattccttgcctgcgttacaaattctaaagtattcgctagaaccatctgcgatatatggccccatgtgacgcgtgtcatcgcctgtttttctttcgatatgaattacccgggcaccactatctgcgagcattctggtacaagtagggcctgagaggacgtgggtaaagtcaataacgagcatcccgcttaaaggataaggtttgtttttatctaaatgactgttttttgcttctagctcagcataattaggttctgtcatagttgtgcgctttctattttaaaaagaaaaagctgttcgaagtgaacagctttttgatgagaataaattaattattcacccttgataacttcagtacgtggattcttaggaccttgagccttagaaattacgccttcttcagtcaatttttcgatttgatctggatcataaccaagtgaagctaaaatttccttgttgttttcaccaagatctggagcacgcttgtagttagaaagtgagaatggcaaaccaatagtcttgaacttaccacggttaccaccttggtcgatggttacgatagtaccatccttgttcaagtccgggccattttcaatttcgtgccagtcaagaactggacctacaggaataccagcagcaccaagcttcttagttaattcatacttgtcgtattgcttagtgtagctttcaattaatgggtaaatttcttccttgtgtaattgacggttgtgccagccatcaaagcgaggattagtttcccaacctttagccttgtaagtccgaccgataacttggccaccttcagtgttctcagcacgaggaattgccttgccccatttccagttagggtaaacagcgtagtgaggaagggcacctaagttgtctaacatgatttggttacgcaacttgatacggcagaggttcaatacagcgtcttgcattgactggtaaacaaaaataccttcactggtgtgttcacgttgaagaagggcagctaagataccaatagtaaggtgcatccctgggtttgagtcacctaaagtagcagctgattgagtaggaacgttggctttgccttcgttccaaccagtagcagaagcagcaccaccagcagattgagcaactggttcaaaggccttaacgttttcaaaacgtgaatcttcattgaagcccttcaatgatgcatagatcaatcttgggttcaaagcgtgaagcttttcccaaccaaaaccgttacgatcagctgaacctggtgcaatgttttcaacaaagacatcagccttcttagccaagtcgtacataatctttttaccttcatcagtcttgatgttcaaagtcaaagacttcttgttggcgttcaattgcaagtagtaaagactccatgaatcttgaatatcaagtaattcatttctagtagggtccccagtgttagtacgttcaatcttaataacttcagcaccaagccatgctaaaagttgagtacatgatggaccttattgaacttgtgtccagtcaacaactttaataccttttaaaggtgcatattcattttcttcagtcgtgattaattgtccttatcttcaagttgtgctaaatctaattctgggtttaagttaccaatgtgaccagattccttacccattgattcaggaatttgagcatcaataattgaaggattacctgattcgtaggccttttcaagagcatccttcatttcagcgtagttacttacacggtagctgtcaccaccaaaggccttagcgatttcagcatagtgagcattgtggcttaaaacagtaggtcctaattggtctttaactgggttacggtcaccattgtagataccaccattgttaatgatgacaacggtaacaggtaagtggtaacggcagataatttccatttccattccgtccaaaccaaaggctgagtcaccatgaagtgagatgactttcttaccagtttcaacagctgcagcaatggcataacctaggccgacacccattacgccccaagtaccagtatcaagacggtgacgaggcttttgcataccgattaagttacgaccaatgtccaaagtgttggcaccctcacttacgatgtaagtgtcagggtgcttttgcatcaagttattgataggttcaattgcactgtagaagcctaaagttggcttagcttcagaatcagcgattcttttagcaaatttttcattgttagcttcacaggcattcttaattgaatctagccagtcttgaggggccttaacgttagctttttcaaggggtgcgtttaatttttgtaaaacagaagtaatgtcaccttgtaatggggcatcgatctttctgtttgaatcaaattctgttgcgtcaatatcgacttgaacaaacttagcgtcttcattaaacaatggagcctcaccatttgaaagcatccaattaagccgagcaccgattaataagactacatcggcttgacctaaagtaaatgaacgagctgaagcagctgatgatggtgagtcatctggtacaacgcctttagccattgacatcggcaaaaatggaataccagtcttagtaactaattctctgacttctgcttcacttctagcataagctgagcccttacctaggataatagcagggtgtttagcgttctttaataattcaacagcacggtcaattgcatcatctgatggcaattgctttggagctggatcgactacttcatagatatgagcgtctgacttttgtgcaactgtgtcagcaactgttgcagcaggaaggtcaaggtaaccaccaccaggccgaccgctcatagcagttctaacggcacgagcaactgctaagcccatgtcttcagcacggtcaacacgataagctgctttacataaaggtttagcaacattgtattgatcaagtccttcatagtctccacggtcgaggtcgatgatatgacgatctgatgaacctgagatcataatcattgggaagcaattcttagtggcttctgctaaagcagttaaaccatttaagaaaccaggagcagaaactgttaaggctacaccaggcttgtcggtaagaaaaccagcagcagcggctgcgtctacagctgcatcttctcttctaaattcataaaacttcataccctttaattcagctaaacgggcaaagtcagtaactggaatgccgacaacaccatacatgttgtttaaaccgtttgcttgtaaagcatcgattaaaagtgcagcaccagtaagtgatacattttgtgtcacgaaaaaaattctttcaaaaaatcaccaaatgcttatgtttatgcatttcaaaaccaagatacacctcttgaattgtatatacaggcataattgaataataaggtacgttattttaatatacgtatataaaaataagcaagtcctaatatattagaacttgcttattatacttttattcaaaattgtccatttcttcgattgccttttcccaggcagaatttgcttcatctaatttctgttgtacatcagaaagctgttcttgcagtggccccaatttatcaaagcttgaagcaatttctggattggccatttcggtttggatttcttgctctcgttcttcaagctgttcaatttgtttttctgcattatcaattgcacgctgcaactttctcttttgagaatcacgttgcttttgctcttggtaagaaagtttttgctggctaatttgtttgcttggctcgacttctggctcagcggcactattttcagccatagctgcttgttttgccttctcatcaagataataagaataattgccatcgtagactttagcatgcccatcgcgaactaaaacaatcttattagctagttgattgataaagtaacggtcgtgggaaacaaagagcagggtaccatcaaagtcttttaaagctttttctagtacttcttttgcttcgatatctaagtggttagttggttcatccatcagtaagaagttatcatgttcaagtgataaaacagttaaagttaaccgtgctttttgtccaccagatagttgacctacggtcttatcaatgtctttagctgtgaataaaaagctggctaagattgaccgtacatcgcgttcaggcatggtcttatgacgatccccaacagtatccaatacagttttagatggatctagtctttgtaattcttggtcgtaataaccaatctcaagggatgcgccatacttaattgagccactcttgggcgttaattgcttcataatagtcttaagcagggtagatttaccgattccatttggtccaatgatcgcgacgcgatctcctttattaatctggaaggaaatatctttaaccatggttttatcgggataaccaatcgtcaaatcgttgaaaattaatacttccttgccagaaggatgatcgcttgaaaaatgaatccgtaccttatttttatgtttaggtggagtaatccgctcaattttttctagttttttacgccgactttgtgcacgcttagtggtagttgctcgaaccaagtttttttggataaattcttcatcttttttgatttcagcttgttgcttttcataagcggcttcttggtccttatcacgttgctcgcgctgcatgacataggctgaatagttgcccttaaaagcagttaatttaccaaattctagttcaaaaatttgggctgctaaatgatctaagaaatattggtcgtgggaaaccacgaggattgcaccactgtaattctttaaaaatccttccaaccaatctagggtatctaaatctaagtagttagttggctcgtccaataacaacagagcaggtttgcgcaaaagcaacttaacaaaagctaaccgtgttttttcaccaccggataaactaccaatcttcttttgccaagtgtcttcaggaaacttaaagccattcaagatacttttaatatcagattgataagtataaccgcctttttgttcaaagttgaattgcttttgatcgtattgcttaagcaattcttgatcttcaggatgatctgcaattttttcttgtagttggactaagctttttctttcccttattaaaggagcgaaaacggtttccatttcatcccaaatggttttattttcatctaatgcattttcctgagcgatataaccaacatcaatgcctttattaactgtaaattcgccgtgagttggttcttgctcacctgtcattatttttaacagggtagtcttaccaaccccgttaggaccaactaagccgattctggcattggaatcgattgaaaaattaacatttttgaataatgtgttggccccaaattgttgttctaaatcgtgtccttgtgcaataatcataatttttcacctaaccactattctaccatatagcgcaaattgtttgtttttaagttaaatatgtgaaaaaatgatgatttgtgaaaaagatacttgcataagtactatcatagcaggtatgatagtagtgcttgattgtacattcacaaacatttaagtttggagggttcctatatggaaaaaataaaaatcccaaaagcaacggcaaaaagattaccattatattaccgttatttgattattttaaatgaagaaggcaaagataaggtttcttcaactgagctgtcagaggcagttcaagtagatagtgcttcaattagaagagacttttcatattttggtgcgttgggaaaacgtggctatggatatgatgtaaagaatttattgagcttcttcaagaaaattttgaatcaagatactttaactaatgttgctttaataggtgtaggtaatctgggacgggcgctgcttaattacaactttaagcgcagtaataatattcgaatttcctgtgcttttgatatcaataaggagattactggtcgtatcttaagtggtgtccctgtttatgacatggacgacttaaagcaacaactaagtgatcaacagattacaattgcaattttgacagttccttcaacagctgctcagaaaaccacagatgaaatggttgatgcgggtgtaaagggaattatgaactttactccgattcgtttatcagctccagctgatgtgcgagtacaaaatgtagacttagcaaccgaattgcaaacgttgatctatttcttagatagtgacaaagaaaactaaatttgagtaaaagaaacatactaacctagtgttggatcatgaatcgacggattcacgatctggcactttttattttgtctaaaatagaaagtgaagataaagcaaatcaagtcttcagctttttagacacttgatgtcgtaaaagaaacggactgctttaccacctattcttaagtctcttcgaagtctgtgggcacttagatgccgtgtttagaaaattagaattaataggttgataaagaggtttatcttcacagcggaggttatattatggaatcacaaattattttcggtattgatgttagcagtaaatcttccacagtttgtgtggttaatgaccggatcaaacaaggcgaatcttttagaatctctaatgattcctttggctatcaaaaactttatgagcaactgaaccaatatttgataactcctttagttgttttcgaagctactggtgtttattctctaagcctgcaagctttcttagaggattatcatattaagtatttgaagcttaatccgcttaaagcgaaaaagctaatggacaataatttacgccataataaaactgataaggtagatgcttatcgcctggctttaattcaatttaatgccccgcaaaagctgcgtgatccacagcccagagagtatcatgaacttcagaatgccagtcgctattatgaagaacttactaggagtatagttactactaaaaatcaattgcaccgcaacctccaatccactttcccacaaattgaagaaatactgtctcatccatctggcagaatttattgggcgcttgttagtcttttcccacatgctggatatgttctagaaaagaatgagacacaggtaactcaaatgcttaattctatttctggaataggacaacaaagggcacggtacttaaccacaagattatacgcttttgctagagaagcttatccttatgattccaaagatagtattatcgttagagctattcaaaggaacatttctaatttattttcactccagcaagaacgcgactatgtaattaactacatggaaaagctggctaaagcagtaaacgctcgtgctttatccatctatttgagtatcccaggggttgctagaattacagcagtgagattagtagcagagctcggtgatctaagacggtttagcacttcagctcaaattgatgcgtttgttggcattgatccaggaaggtaccaatctggtgaaaaagacagttctcttggcattaccaagcatggcaatcatattgccagaaaaatactttatcgagttattactcaaatggagacggtaaaggctacgcagccttgccatataactgattattatgacaagaaaaaacgatcttcaaatagacaaggctataagaaaatcgccattgcatcagtccataaactgatacgcacaatgtttgctcttatcaaacatgatcaattatatgattacaacatagccaccgaaaataaaagactttagctgaaatcaaataatcaacttaagtataagcaacctatggaaaaactacaagtattcataggcttatttgtggtactttcgctttttcttaaatttaaactcttatttgctttaaccttattcgcatcattaaaacaagtaaatttattttcttaaatcattgataatacttgactttgggtagaaaaaagccgattttcggctttttttcatgcagttgtttcacttttgattaatttgacaggcaaaatataattcttttggcgcaatttttcgtcgggattggaaattcgggtaagcaataacttaaccaataaagttgcaatatcatgaattggctgagcaattgtggatagttccgaatggtaagtttgaatttgctttgttccgtcaaaaccaatcacttttaattccttaggcactttaatgcctaatttttttgcttcttgtaaaactaacactgcagttaaatcatctgtgcagacgacgccatcaggctgatcattgactaacatatcatgaattttcatatttttaatgttggaagaatcagaaaaagcaactgaacgaatgtgggctgaaaagtgacattcctttgcttcatcaagataagctgctagtcgttcgtcagtcggattaccttttctgtgttcattgcccagaaagtaaattttgtgacaaccagcttgaaccaagtcatgtactgccaacttgatgccttgataattatcacaactaacaattggaacattatcagatagctttcggtcgaaagagacaattggcaaacctagttgttggtattcattgatacctagattgtgcgcaccagcgatgatgccatcaacttgattagcctgaagcatgcgcagatattcgcgttctttttctttgttttgtcctgcattgcataggattactttatagttttgttggaataaagtggtttcgatatcctgtactaattccgcaaaaaaaggattagtgatctcaggaaaaatcaaaccgactaatttcattttctttccttgtaatgagcgggcaatagaattgggacgataatttaattcccgcattgcggcaaaaactttatctttagttttttgacttaaatagccatggttgttgattactcgcgaaacggtagttacagagcaaccggcttttttggcaacgtcgcttaattttgctgccatagtatcacctgatgtttaaagaattgtttgcatttgccaaagcttgccagtgtagtcaatgtcttgagcaaacgcaatttttttgttggtctgatcggcaaagtagcgtccagtcaataccttttcaccatcattaacgaatacttcaattaatgaatgatcaacaaagatatcaagcttgaggtcatgatttggtgaaagcgtaatagctcgactttcgccataatcaactgctactttttgcccagcatgagcacgatctaatactaatttaccatttttggtatcgaaattgagctgtaaactgttacttaagtcattatttgcagctaaatgtaaagtgccactttggttagccttaattgttaattcaagttcaaattgttggccggcttgatcgctgactacttgattagatatgcttgcttcgtttttgcggatactgcttattgccttaactggcgtttgaattaacttgtcactctttaggtggagttccttcacttgactcaagcagttagcccagttttcatcatcagtagggtaagtagtgtcaggcaagccaacccaactgacttcgtaggcattaccatctggggcgttaaaggcctgagtggcataaacatcgaacccgtgatccaaattgtgtaatttacctggattaattaacttatgattttcccagtcaatatcatcagcaataacgtacatatttgggtaaatgtcatcataagctgctacttttttgtctaaaccctgaggacagaaaatgaccacgactttgccatcaacacggacgatgttgggacactcgatcatgtagcccatgtcttcgttggtaaagtctaagaagcccaattcttcccagttctttagatcctgagacttccaaacgtcaatgtgaccgtgtttttcctttttatcttgggcacctaaaattgcgtagtaagtgtcattttctttgataatttggggatcgcgaaaatgttcggtgatgtgatctggattcttaaataggatggttttgtctgaaactttattatttttatccatccaagcaccgatttgataaggagtacgtacccaattttcatcgcggtggttaccggtatacatgatgaaaagcttaccatcgatttcgcgagcagagccagaataagctccatgtgaatcagccattgtgtctggttcaatacctaagcctaagttttcccagtgaaccatgtcagttgatttgaagtgccaccatgactttagaccgtgaactgcgccgaatggatatgattgatagaagaggtggtaagcaccatcaaagtaggaaaatccattagggtcattaattaagccagaaataggatgcaaatgatagcgcatttggtaaggggagtttgcggcttgtgcttgcaaatgcattaatgtatcagcgtcccaatcttgataaggtaagtaacgtttttctcttgtccattccataaatatacctccatgaaagcgttgtctttttacatgtattttaagttagtatgaaaaatatgtcaaacgtttaacagaaaaaataattattaattcataagtaataaaataaataaagaattttatgtcaaacgattgacatattttttgaatgcgttatcataattagtgaattgagaataaaacgtttacataggagggatcaatatggaccacagaaaagtggctgaacgagtaattaaagacgtcggccgtgacaatattattgccggtgcccactgtgctactcgtctgcgtttagtattaaaagatgattcaaaagtcgaccaaaaagcattggataatgatccagatgttaagggtacttttaaaaccaatggtcaatatcaagtaattattgggccaggagatgttaatgacgtttacgatgagttcattaaaatcactggtttgaaagaattatcaaccgatgatttgaagaaggttgctgcagaaggtaaaaagaagaatccagtaatggatttcattaaacttttgtctgacatctttgttccaatcattccagccttagttgctggtggtttgttgatggctttgaacaacttcttgacttcaccaggtctgtttggaccaaagtcagttgttcagatggtaccgaatgttgctggtatttcaagtatgattcaagttatgtcagcagctccgtttatttttatgccaattctagtcggaatgtcggcagctaaacggttcggtgctaaccaattcttgggtgctacaatcggaatgattatgacgacacctggactccttggtgcaaatcacttctgggacatttttggcttgcatgttgcgcaaactaactatcaataccaggttattccagttttagtagctgtttgggtattgtcaattttggaaaagtacttccacaagcacttgccatcagctgttgactttacctttacgccacttctttcaattatgattactggctttttgacttttacaattattgggccagtcttcaaaggcgtatcagatggtattaccaatgctatcgtttggctatatgacactactggtgcctttgggatgggtgtctttggtcttacctattcagctattgttactactgggcttcatcaaagttttccagcggttgaaactcagcttttagcagcctttgctaagaatccagccagctctggtgactttatctttgttaccgcatgtatggctaacgtagctcaaggtgccgcaactttcgctgtttacttcttaactaagaacaagaagatgaagggcttggctagttcatcaggtgtttcagcacttcttggtattactgaaccagcacttttcggtgttaacttgaagtataaattcccattcttctgtgccttaattggttcaggtgtagctgctgcttttgcgggcttgatgcatgttactgcagccgctcttggttcagctggtttcttaggcttcctttcaatttatcctaagactattccaatgtgggttgtttccgtattaattagttttgctgttgccttcatccttacttatgtttatggtaagggtcatttgaaggaagaagttgctgaacaagatgttccagtaaacgacgcaactgattatgctgaagaaactcaaaaggctgaaaagcttggtaaggaacaaatggcattaaaggatgaagttattgcttcaccagttgatggtactcctgagagtttaactaaagttaatgatcaagtattctctgctaagttaatgggtgatggtgcagccgttattccaagtgatggtacgatctattcaccagttactggtactgtgactattgcttatgaaactaagcatgcttatggcattaagtcagacgatggtgcagaagtattgattcacattggtcttgatactgtaaaccttaagggcgagcacttcgaaagtttcgttaagcaaggtcaaagagttaacaagggcgataagcttggtacagttgaccttgatgctgtgaaaaaggcaggctatgatactactgtcatggtagtaattactaacactgccaactatgcaaatgtttcaagaattactgatgcgggtgacaagcacggcgacaagttgattgctgttactgcacacaattagtttcttctactcctctagaaaaaattaaaacaattagaataaaagacgctaagaaagattgtttcttggcgttttttagtactaagtgttgcacttcaattttaagtttgagtaaaatgttctctataaagaaaaacaaagtgagggtatgttttatgaagttaaaaagtggagttattggagtattagtaactggattaactgtctttagcattaatctaactagctctaaaataaaggcagcgataacagtgcctaatcctaagacagattatgtagttaaaactacttctaatgtgtataagagtaatggtaagaggaccagttttaagacacgtggtcagatacaaaccggtaatgttccagtaattgaatcacaactatatgaaggcaagttcattaatgtgcaaggaactaagacgattaatggtactgcttattataagatcggtcctaacgcatacattaaacaaaataatgttttaaattatgctcaagaaaaagcaaagcttgaggcatatcaggcacaagatgatgtgaatgatgattcagatcagtcaacagaattaagctctgatgatgtgaattttgacatagcttggtatgacaacattaatgaggatccatctccagcgatgttcgatgattcaggatatcataatagagtgattaagaatgctcgtaaattattaggctatttcacttatggaacaggtgcataccgaactaattttggcagttggcgtcatcctaataaaaacggttcaactgattgttcaggatttgtgtggatcgtaatgaagagagcaggatatcgtgtaggaaatgctccattttttactctgccaatggaacgagatgctaaaagtactcatggctatttgaagaaaatttctgccaagaatattcgcccaggtgatattgtgattgttaatactggcaatggtgttggtcaaaacggacatgcagcaattgttgatggcaaatatgatggttgggacacgcaaattattgaagagggcggcaacttaggtgtagatgatgtgcaccgctctagtttaggtagctcactgagcgataagctggccaaaggtcgaatcacttatgctcgccccgttaaatagtatgctctatgctataattttgctaatcaataaaggataataagaatgaaaaagaacagcacgcttaaacatgtctggattatgacggctgtctattgggtagtaggtattctaagtattttctggggtaagcttgatcatacttttgcgtctcaattaaaagagatcaataatatttacgtgttagttttaataattatcttaagcttgccgctacttttatcgctgttattgtcggttaaagtaaaaatgccacgtttgatctgcaatccactagttgctgtaatttatctattagtggtaattgcagcaggtgtagcatataacttacaaaatattattggctatcccaatcatcctcttcattattatggcgctagttgctgttttctatgctttggttaagacttttagcagcagaaaaagtggtaaatatttttttattgatggtaaagataagaaagaatgccatgatttctgggatgcttataagaagtactatgtaatgggattaacttacggcattattgatggtttgattactgtaattagttaaaaaagttaagaaaaatcaaaattagcactcaattgaaaaaagtgctaattttttcttgctttttttcacaaaacagtttattatcatatttgtaagttagcacttagcaaataagagtgctaatgattaatacagtaataaaaaatataatgaagaaaattaaacataagggggactaaacgtgttacaaccaattggtgatcgcgtgatcgttaaagttaagaaagaagaagaagaaactgttggtggcatcgttttagcatcaaatgctaagaagaagccaactgaaggcgaagttgtagctgttggtgaaggtgcttacgcatcaaacggtgaaaagattccaatggctgttaagaagggtgacgtagttctttacgataaatactcaggcactgacgttgaatacgaaggtgaaaagtacttagtccttcacgaaaaagacattttagctattgctaagtaatttagttaaaatttccaacgataattaagtaaattaaggagcatagataatctatggcaaaagatattaaattctcagaaaatgcaagacgttctcttttaaagggtgttaataagttagctgatactgttaagactactattggtcctaagggtagaaacgttgttttggaacaaagttacggcaaccctgacatcactaacgatggtgttaccattgcaaagtccatcgagttaaaggatcactacgaaaacatgggtgctaaacttgttgctgaagctgctcaaaagactaatgatattgctggtgacggtactactaccgcaactgttttgactcaagcaattactaatgaaggtatgaagaacgtaactgctggtgctaacccagttggcattcgtcgtggtattgaaaaagctactgaagctgctgttaatgaattgcacaagattagccacaaggttgaatcaagagaccaaattgctaacgtagctgcagtttcatcatcttcaaaggaagttggtaacttaatcgctgacgctatggaaaaggttggtcacgatggcgttatcactattgaagattcacgtggtatcaacactgaactttcagtagttgaaggtatgcaatttgatcgtggttacttatcacaatacatggtaactgacaacgataagatggaagcagatcttgataatccttacattttgatcactgacaagaagatctcaaacattcaagatatcttgccacttcttcaagaaattgttcaacaaggtaagtcattattgatcattgctgatgacgttactggtgaagctcttccaacacttgtattgaacaagattcgtggtaccttcaacgttgtagctgttaaggctcctggctttggtgaccgtcgtaaggctcagttacaagatattgctgctttgactggtggtactgtgattactgatgacttaggtcttgaattaagggacactaagattgatcaattaggtcaagctcgtcgtgtaactgtaaccaaggactcaactactattgttgacggtgctggttcaaaggatgctattcaagaacgtgaagattcaatcagaaagcaaattgaagaatcaacttcagactttgacaagaagaagcttcaagaacgtcttgctaagttaactggtggtgtagctgttatccacgtaggtgctgctactgaaaccgaattgaaggaacgtcgttacagaattgaagacgctttgaactcaactcgtgccgctgttgatgaaggttacgttgctggtggtggtactgctttagtagacgttgagaaggctatcaatgatcttaaggctgatactgcagatgaaaatactggtatccaaatcgtattaagagctttgtcagcaccagttcgtcaaattgctgaaaacgcaggtaagaatggtgaagttgttttgaaccacttactcaagcaagaaaacgaaattggctacaatgctgctactgatacttgggaaaacatggtagatgctggtatcattgacccaaccaaggtaaccagaaccgctttgcaaaatgctgcttcaattgccgctcttctgcttactactgaagctgttgttgcagaaattcctgaagaaaagccagctaacccagctccacaagctggtgcaccaggaatgggtatgtaattatatatcttaatgctttagcatttagatatataattcttgattacgaagtaatcaagttcatttacagtgctttagcactaaacttatgcacaaactctcactctagttcaaaaacaaatataattaaaatgacttcgaagttaaacaatcagttcagcttcgaagtttttctttttgtagcgtataatattgtacgtaactctatctaaaatacgaaataggaaagagacataaatgacggaaaaaacaactccaatgatggagcaatattacgaaattaaaaaacaatatcctgatgcctttcttttttatcgcgtcggagacttttacgaactgtttgaagatgacgcagttaaaggtgcacagattcttgaattgactttaacgcaccgatcaaatagaactaagaatccaattccaatggcaggtgtgcctcatatggctgtggatacttatgtaaatactttagttgaaaagggttataaagtagcactttgtgaacaacttgaggatcctaaaaaggccaaaggcatggttaaacggggaattattcaattagtgacgccgggaaccatgatgaatgaaggcccaaatgatgctaaagattcaaattacttaacatcagtaattaccactaagagtggctttggtttagcctacagtgatttatccactggtgaaatttatgctactcatttaaagagtttcgatgctgtttccaatgagctcttgtcacttcgtactcgtgaagttgtgtataacgggtcattatctgaacaaaataaagactttatgcacaaggccaacattacgatttctcgacctactccaattgaaggtgaacatgctgaaatttcttatgttgaacagaatttgactaatggggctgaaaaagaggctacccgtcagttagttggctatttgctttcaactcaaaggagaagtttagcgcacttgcagattgccaaaagctatgaagtaaatcaatatttgcagatgtcacatactgtgcagaataatttggaattggttgcttctgccaaaactggcaaaaaaatgggttcacttttctgggttttggataaaacacacactgccatgggtggacgcttgcttaagcagtggctagctcgtccattattaaacatggatgaaattaaccatcgtgaagaaatggtgcaggccttgcttgatggctactttacacgagaaaatgcagttgatgccttaaagggtgtttacgacttggaacgtttaactggtcgaattgcttttggtaacgttaatgcgcgcgaattactacaattatcacgttctttgcaggccgttccagttattttagatgctttagagcaatcagattcagatatcttggtcgattttgctaaaaaaattgatccattaaagggcgttgccgaaatgattacttccactatcgtgaaggatccacctgtgttgactactgaaggtggcctgattcaaggtggggttgatccgcagcttgatcgctatcgggatgccatgaacaatggaaaaaaatggttggctgaaatggaagcagatgagcggcaaaagacaggtattgataacttaaaggtcggttataacaaggtctttggctattatattcaggtttctaacggtaacaagtctaaggtgccacttgatcgttatacgcgtaaacaaactttgactaacgctgagcgttatatcacaccggaactcaaggaacatgagaatctaattcttgaggcacagacacggtcaactgacttggaatatgatttatttgttaagctgcgtgaggacgttaagaagtatatccctgctttacaaaaattaggtgggcaactagcagcgctggatgtttattgtggttttgctacagtagctgaacaaaataattattgccggccaacttttcacgcagataatcaagatattaatgtgactaacggccgtcatccagttgtggaaaaagtaatgacggctggttcatatattcctaacgatgtcaaaatggatgaaggaaccaacatttatttaattacaggtcctaacatgtctggtaagagtacctatatgagacaaatggctttgattgcgatcatggctcaagtaggttcctttgtgccagctgatagtgctgatttgccaatttttgatcaaatttttacaagaatcggagcagctgatgacttaatttcaggtcaaagtacctttatggtagagatgagtgaagctaatgaagccttgcagtatgctactaagcgcagtttggttctctttgacgaaattggtcgtggtacggctacttacgatggaatggctttagctggtgcaattgttaagtacttacacgacaaagttggtgctaaggcattatttgctacgcactatcatgaattgacagtgatggatgagactctggatcatctgaaaaatattcacgttggtgctaccgaagaaaatggcaagttaatcttcttgcataaaatcctacctggacctgctgatcaaagttacggaattcatgtagctcaattagcaggtttgccgcgcaacgttttgcgagaggcaactaaattattaaagcggcttgaagcacaaggcagtgaactagcaccagtttcgcagcaattagatttatttgcagagcctgtggaaaacagtgttgaagaaactgaaacacaaaatgacaagcccgcaataactgatgcacaacaagatatacttgatgatatttctaatctttatttagcagataagacaccgttgcaggttatgcaaatggtagctgattggcaaaaagatttaaaggatgacgattaatgagcaaaattcatgagttatcggaaactttaactaatcagattgcagccggagaagtaattgagcgcccagctagcgtagttaaagaattagtagaaaactcgttagatgctggtgctactcgaattcgcgttgattttgtagatgctggtttgaaacagattgtagttcaagacaatgggacggggattgcacgtgatcaagttgatctagcctttacccgacatgcgacaagcaagattgccaatgaacacgatttatttaaagtttccactttaggcttccgcggagaagcattagcttcgatttctgctgttagccatgtggaaattctgactgcaactgaaaacgcaattggtattcgagctaactatagtggaggcaataaaaaaggccaagaagatgcagcggctcgtaagggaacaaaaattacagtcaaggatttgttctttaacacgccagccagattaaagtatttgcgtagttcaagaactgaaattatgaagattgtggatattattaatcgacttgcgttaggttatccacatgtgtcttttactttgtcaaatactggcaaaattttattaagaacgccaggaaataataatttaaagcaaacagttgctaacgtgtatggccgtcatatcgcagaaaaaatggaaaaatttgaggcaaaagacagcgattttaagattacaggtctgatgtctaaaccggaattaacacgttctacacgcaattttatttcgattctcttaaacggccgctatattaaaaattttcaattaaatactgcgattctggatggctatggctcaaaattagcagcgcggcattatccgattattgtgttagcaattaaagtagatcctttgttagtggatgttaacgtgcatcccactaaacaggaagttcgtttatccaaggaaaaagaactgggtcgtttaatcaccagtgcaattagtaatacacttgtggaaaaagttggacaaattagcgcttttgctaatttggaaaataaacgtgatacgctagttgatcagcttagttttaacttaaatcaagatgttgtaaatacagctcgtaaaaaagaaccggaaattcgcgaacaagaaaagccaaaatttttaacgattgaatctgatgattcagaagataatattcaaaatgaggcggtaaagcaggatagtgaaaagaaatatgttgatcttaatcagccacgtgaagatgatcaatatatcgttactaagacctggaaacaaaatgttgctctgcagcaagcactaacgccatttcctacaactaggactaatcaggaagtcatttcaagtggggatgaaactttagctaataatctgcctcgcttggtttatgttggacagaccgatacttatttatttgcccaacataatggcgacctatttttaattgatcaggttgctgctagacgaaggttaaaatttgagcaaatttttcacatgataactgccaaaaaagtagtacaacaaggtttgttaacaccaattattttagaatttggtaatcttgattttatgcaaattaaggatcaagtagaacagattaagcaggttggaatctatttggaagattttggacaaaatagttttattgttcgttcgtatccaacttggattcacgataatgtcgaagattcaattcggaagattttagatggttatttgaatgtggataaaggaaaggcaaagaacctgtttagccggatagcagcaatgcaagctaagcgagaaattactggcaagattaaattatctgcagctgaagctgagcaaattttacttgatttacgcaagtgtactgatccatatcatgatgcagatggacggataattttggttagaatgagccaaaatgaattgagaaaaatgtttaagaaggatgaataatgtacgaatattttgaaggtgtgattactgtggttacaccaagctatgttgtagttgatgtcgggggcgttggctacaaggtctatagtcctacaccttttgcctatactcaaggccaaaaagctaaggtctttattgagcaagtggtgcgtgatactggcattactttatatggttttcaaagtcaagatgataagggcttgttcttaaaactacttagtgttagcgggattggtcctaagagtgcaatggcaatcatggcagctgaggatagtaattctttggcggaagcgattgaacaaggtgaagttaagtacctaactcgttttccaggtgtgggtaaaaagacggcttcacaaattgtgcttgatttgaagggtaaattaggtgattatgttgctcggcttgatcgtccagacaatggtgagaatgtgccgccagcattaaatgatgcactgcttgctttaattgctttgggttatacccaaaaagaagtggatcggatcacgcctaaactggagaaagttgctgcaaatactgcagatcaatatattaaaaagggcttagcattactgcttaaaaagtagatcttggtataatagaatagatgattattttttaaggaagtgaaactggtggcagaagatcaagtaacttcaggtgatattgagaatcctgaagaacaacaaatggaactttctttgcggccgcaaacgctcgaccagtacttaggtcaaaagcgggtcaaaaaagaaatgagcatttatattaaggcggcgcgccaacgtgatgaagcattagatcacgttttgctttatggaccaccggggttaggaaagacaactttggctttcgtaattgccaatgaattgggagttcatttaaagagtacaagtggtccggccattgaaaaggcaggcgacttggtggcacttttgtccgacttagatcctggggatgttttgttcattgatgaaattcaccgtttagctaaaccagtagaagaagtactctactctgcaatggaagactactatatcgatattgtgattggcgaggggcagactactcatgcagttcacgtgccgctgccaccatttactctaattggggcaacgactttggctgggcaattgtcagcacctttgcgtgatcgctttggcatcgtagagcacatgcagtattacactatcgatgagctagaacaaattgttttgcgttcaagtgatgtttttcacacttcaattgcgcctgaggcggcccatgaattggcacgacgctcgcgtggtacacctcgtgttgccaatcgcttacttaagcgggtgcgtgattttgcggaagttaagggagaaaaaacaatttcgctcgagactactgaaggcgcgttaaaacaattgcaggttgacgatgagggacttgatcagacagaccgcagattattgagaacgatgatcgaaggatataatggtggtcctgttggtattcggactttggcagctaatgttggtgaagatatggaaacgattgagtcactatatgagccatatttgttgcagcatggttttattttactcacgccgcgtggcagaatggtgacggataaagcatatttacagttaggattaccaattccaggtgataaatagtcccattttctgtataatggttataatatctagaaaataattttaatgaggtggaaattttgaacattttatttttagcaaatgccggtgctgcagcaagtagcaactggatgatgatcggtttatttattattttgatcgctttcacttactttggtatgattcgtcctcaaaagaagcaacaacaacaaagaatgcaaatgatggacaaattgaagaagggtgacgaagtcatcttagttgatggtttgcatggtaaggttgacaagatcaacagtgataagactatcgtggttgatgcagatggcatttacttaacttttgaaagaatggctgtccgtcgtgtgattccagttgctgcaccagcaactcctgcagctgaaactaaggctgaagctccagcagaaaagccgaaagaaaaagcagacgaaactaaaaaagaggataagtaatcatattacttaagagcgtcattttaggcgctttttgttttgctaaaaaaatccttgttgtaaaatagaagtgataattttagttcaaagaaagggatctgaaatgaagaatattcccgttgtaatgattctttttggtggtagtggtgatttggctcaccgcaagctttatccagctttgtttaatttgtatgaacaaggcttaattcacgacaactttgcagtaattggaactgctcgtcgtccttggtcacatgagtatttgcgtgagcaggttagtgatgctattcatgaaacgcacgatactgttgatgaaaatgagttgaaagcttttgcaagtcatttttattatcaatcacatgatgtaactaatgtggaacactatgagattttgaaaaacttggcacaagagctcgatgatcgttatagtgcacaaggcaatcgtctcttctacatggctatggcaccaagattctttggcacaatagcaacgcatattaatgaccaagacttgactggtagtggctttaatcgaattgtagttgaaaagccatttggtcatgatttggcttcagcagaggaattaaataagcaaatcacggcttcatttgatgaaaatgatatttttagaattgaccactatttaggtaaagaaatggttcaaaatatcatgccaatgcgttttactaacccaatggttcaaaatatttggtgcagcaagtatattaagaatatccaagttaccttggcagaacgtcttggcgtggaagcacgtggaggttactatgatacttcaggtgctttgcgtgatatggtacaaaaccatatttttcaaattattactctgctagcaatgccagaacctaaggatctttcttctgctagtgttcaccaagccaagcaagatttgcttaagagtttaattattcctacgccagatgatgtcaagaaatactttgttcgtggtcaatatttgggtagtgatactacttttgcttataagcaagagccaaatgttgatccagagtcaactactgaaaccttcgttgcaggtaaagttaagtttaatgagggaccaattgctggcgtaccaatttactttagaacgggtaaggaatttaaagaaaagaagaaccggattgacattgttttaaagcatattaataatccatatgggcaagctcattctaacaatattacgatcgtgattgacccaactagtgaaatttactttactattaatggcaaacgaattgaccaaccaggaattcgccgtgaaaacttaacttatgaattttcaaaagccgaaatggctaaggtacctgatggttatgaaagattgcttcatgatgtttttgtcaatgattcaactaactttacgcactggagcgaattgaagcgttattgggaatttatcgatgcagttgaagatgcttggcagaaggaaaatgaagcaggcaatccagccattgcacaatatttgccatacagaatggggccaaaggaagctaatacaatctttgagtcaccaactgaacattggatttatgaataaagaaaatttattaccgcaaaatgacatccatcgtcggattattcatctggacatggatgctttttatgcttcggttgaaatgcgggagcatcccgaatggaaaaataaggcattgattgttgggcaagatccacgacaaaatggtggacatggagtagtggctacttgcaattatgtagctcgtaagtatggcgttcattcagctatggccgcaattcaagcagtacgtttggttcccaaggagctaatagtttttactagaccacgatttgataaatatcgtgcagtgtcagctaaaatccattcttttatgcatgatgtgacagatcaggttgaatcagtggctttagatgaagcttatctagacgtgacacatccaaagatagagcaggagtctgcagttcaaattgctttagatttacagaaaaggattcggcaagaagtaggcttaaactcgtcttttggcgtttcctataataagtttttagctaaaatgggatcagaatacgccaaaccgtttggtcgaaccgtaattttgcctagtgaagtgcagaactttttagcaatgcaaaagattgagaagtttcctggtattggaccgaagacgcaagaagagctgcatcagatgggtgtttatactggggcagatttacaaaaaattgaggttttaaccttaattaaaaaatttaagaaaatggggtatattttagcccaacatgcacgtggaatagatttaagacctgttgttacagactcagaggctaatcgaaaatcaattggcatggagcggacttacgagcctgcaatttatactgaggatgaagccctaaccaatattcgtaactattgcaatcatttggaagcagcattaaaaaaacgcaattttaaggcaggtactgttgttattaaagtaagaaataataattttgatacggtaaccaagagaaaaaagttgaaaacaccttctgatagtcacttagatttttatgatgtggctcgtgacttgttcgaagcaacaagttcctttttagatgatggaattcgtttattgggagtcactgtaactgactttgaaaagaaaaaatatcaatcaatcagtttgttcgactaataaataaagctatttttctggtaaactagatacagatatttttacaagatgaggagattaaaaatgagtagttttgatgacatttatgaaaaaatcttacaatatcctacaattatcttgcaccgccacactagtcctgatccagacgcaattggttcacaagctggtttagctagagcattaatggaaaaattcccggacaagcgcatactttgtgctggggaaaacgatgaaggcgacttagcttggattaaccacatggatcaagtcaaggcaactgattacgaaggtgctttggtaattactactgataccgctaatacaccaagaatttctaataagttgtatgataagggtgactttttaattaagattgaccaccacccagatgttgatccatatgctgatatgagttacgtagatccagatgctccagcagcatgccaaatcattgtagacttcttgaatgaagagggctttaagattaccaaggaagttgcttacccactttatgctggaattgtaggcgataccggtcgtttcatgtatccagaaacttcagagcatacttttaaggtggctgctcaattagcttctactggaattaacattactgaaatcgctcgtaatattgctgatgtaacttttgatgaggcaaaattgcaagccttggcaatggacaagatggaaattgatcccgttggtgcagcttttacaattttgatgcagtcagacttgaagaagttaggtttgactgatgatcaagcaaatgttgctgtatctactccaggacgtattaaagatgtgcttgcttggaatgtttttgttgaaaaaccagatggtactttccgcgtacattaccgttcaaagggccctgtaatcaatgaattagctgctaagcatgatggtggtggtcatgcattagctagtggtgctaacgctaaggatatggacgaagtaaagcaggtatttgcggaagtcgttgaagtaactaagaagtttaaagaagatcatgaataatatttttatagattcaagaattaaaccagctattcaggctggtttaaagaagatccattttgaaaagccaactaaggtgcaggagaaagttattcctgctatgttgtctgacttgagtgtagtagtgcaagcagcaaccggttcaggaaaaacgcatgcttatttagtaccaatttttaatgaaattgaagaagataaacgctatgttcaagcaatcgttactttgcctagtcgtgaattagccgatcagctttatcaagtagcacggcagctccgtgatgcggcagggatgcatttttcaattgcacatcttgcgggcggaactgatcgtgaacgtcaattagaaaagtatcaaaataatactccacaattggtgattgcaactccaggacgtttgttagactttgttcaaaagaaggtttttgcagttgatcaagtaaaaacttttgttatcgacgaagctgacatgaccttggacatgggctttttgaacgacattgatcaagttgctgctaaattgccgaaggatgtccaaattgctgccttttcagcaactattccagttaaattgtctaactttttacgcaaatatatggctcatcctgatgagatcgttattgataatcctagtgttattgcgccaacgattaaaaacgatttgcttgatattggctcaaaggatcgcaagaatgtcttgtacaaattgttaactatgggacaaccatatttggcgttggtttttgctaacactaagcaaaaggtcgatgagttgactaattatttgcaagatcagggtttgaaggtagctaaaattcacggtggggtaactgaacgtgaaagaaagcgcactctgcgtcaggttgagcaaggacagtatcaatatgtggtagctagtgacctagctgctcgtggcttagatattgatggtgttagtctggttgtcaattatgaaataccacgtgatattgagttcgtgattcaccggattggccggacggggcgtaatggcttatctggtcatgcgataactttaattcgtgaagaagaaatgaaccgaattgaagaattggaaaagatgggtgttcattttgacttcgttgaaattaaaaatggtgaattagtgccacgtaaacactatcgcagtcgtgaaaatcgtcaaagcaagaatcgtaagcttgataccaagctggtgggttacgttaaaaaagagaagagaaagcgtaagccaggttacaagaagaagattaagcgtgcgattcaagaggataatcgtcaaaaacgtaagttggaacagcgtcatgaggttcgtaaggcaaaacgtttgagaaagcgcaagcgtgaacaagggctttgacagaagcggattttgtagtacaattatttcagcttaagatatgttttttgatcaattatttcaaagagagagccagttagatgagaatggcttaataatagtcaaaaaatgctcctttaagtttcataattaagaatatcaagaggtaacaaacactgttgcaatcaaggtggtaccgcgcgtggagcgtccttgaagaaagcaatagtgttttttatttatttttagggagatttattttaatgaagaaactaaatagttcagagtttcgccaaatgtttttagacttcttcaaggatcatggtcacatgattatgccaagtgcatcattaatcccacaagatgacccaactcttctttggattaactcaggtgttgctaccatgaagaagtactttgatggctcagttgtaccaaaaaatcacagaattacttcatctcaaaagtcaatcagaaccaacgatattgaaaatgttggtaagactgcacgtcaccaaactttctttgaaatgcttggtaacttctcagttggtgactactttagagatgaagctattccttgggcatgggaattcttaactagtcctgattggcttggcttgccaaaggaaaagctttactgtactgtttatccaaaagatgaagactcatttaatgtttgggtaaaggcagggatgccagctgatcatattgttaagttggaagataacttctgggatattggtgaaggtccatgtggtcctgatactgaaatcttctacgaccgtggtcaagaaaacaacgacgttgctgaagacgatccagaaaacttccctggtggtgaaaatgcacgttaccttgaaatttggaacatcgtattttcacaatacaaccacttgccaaatggcaaatatgtagaccaaccacacaagaatatcgatactgggatgggactagaacgtgtgctttctattttgcaagatgcaccaaccaactttgaaaccgacttgttcttgccaattattcacgccactgaagaaatgactgatgacaagaagtacggcgttaacaaggaagacactactgctttcaagattatcgctgaccacgttcgtgccgtaagttttgcgattgctgatggtgcgcttccttcaaactcgggccgtggttatgttcttcgtcgtttgatccgtcgcgcagacttgaatggtcaacgcttaggaattaagggtgccttcctttccaagttggttccagttgttggaaaaatcatggaaagtcactacccagaagttatggatcaacgcggctttatcgaaaacgttatccaaaacgaagaagaaagatttcaatcaactcttgatactggtttgactttgcttgacgacttaatcgacaaggcaaagaattctaaggataagaccatttcaggtaaagatgccttcaagatgttcgatacttacggcttcccatatgaattgacttttgaatcagcacaagatgctggccttaaggttgacaagaagggctttgatgcagaaatggctgctcaaaaagagcgtgcacgtaaagctcgtggtgaccttcaatcaatgggacgtcaagatgtaactttaatgaacattaaggataagtcagtctttgaacgtgatacttacgaagaaccacatgcaaagctagttgacattgttgttgatgataagttggttgataaggccgatggcgaacatgctactttggtctttgacaagactccattttacgcagaacgtggtggtcaagttgccgaccacggtgacatttacaaccaagacggtgaattggttgccaaggttactgacgtacaacacgctcctaatgaccaaaacttgcactttgttgatttgattttgccagttgaaaagggtcaagaatacgtattgaagttagataaggaacgtcgtgaagggttacgtcactctcactcagcaactcaccttcttcacgctgctcttcgtcaagtcttaggtgaacacactcaccaagctggttcattagttgatcctgactacttaagatttgactttactgcaatggaaccaatgaccaagcgtgagcttaagaccgttgaagaattggttaaccaaaagatttgggaagctattcaagttaagactactatcactacccctgaagagggtgaaaagatgggtgctttagccctctttgatagcaagtacggtgataaggttcgtgttgttcaaatgggtgacttctcaagtgaattctgtggtggtactcacgtggacaatactaaccaaattggaatcttcaagattacttcagaatcagctgtcggtgctggtatgcgtagaattgaagctgtaacttctaagaaggcttatgaatacttggcaaaccgttcagacttacttgatgatattcaagaagaagttaaggcaaccaagccagataacattgtcgataagattgattcacttgaaagtgatttgcacgatgctcaaaagcaagttgaaactttgaacaagaagatcaatgctgctaaggctggtcaaatctttaatgacgttaaacaagctggtgacttgactgtcattgctgctactgcagatgttaacgggatgaatgacttgcgtgaacttgctgataactggaagagcggcaacaagtctgatgttttagttttagctgctgaaaatgctggcaaggctaatatgattattgctttagaccaaaaggcattagacaagggccttaaagcaggtaacttaatcaagatcgctgccccaatctttggaggtggcggtggcggccgtccaaacatggctcaagccggtggtaagaatccagcaggcttgaatgatgctattaaggcagttattgacgaaatttctaagaactaagaattaattaattgtgtttaagctttttttcaagtaaaattgttgacaggaggaataaatatgagttcgctagataagactatgcattttgactttaatcagaacaaaggaaaaaatgtttatgatactctgcaagatgtttacaatgcgcttgaagaaaagggctataatcctattaaccagattgtaggttacttactttctggcgatcctgcttatattccacggcataacgatgcccgtaatttgattcttaagcacgaacgtgacgagattattgaagaacttgttaagagttatcttggtaagaataaataatgcgtttattaggtttagatgtaggttctaaaactgtgggagtagcaattagcgatgagctaggaattactgcccagaagttggagactatccagattgatgaaagcagatataactttggtatgcgtccattgaagaagctagtcagacagtatgaagttgacggtttcgtattaggtttacctaagaatatggatggtacttctggtagttccgtagctagaagtaaggcatacggcaaacgactagaggaaaagtttggtttacctgtacattattctgatgagagattgacaacaattgaatcacgacgagtacttgttgaggatgcagggatccatgatcgcaagaagcgtaaacaagtaattgatcagatggcagcggtgctcatcttgcaaaattatttagatttacaccgaaaggattaaaatggcagcacaagttaatggtgacgatcaagatcgtcaaattactttgattgatgatcaaggtaatgaagaattgtatgagatattatttacttttcattcagatgattatgacaaatcttacgtgcttctttatccagccgctgttggcgatgatgaagatattgaggtgcaagctttcagttatgatgccgatgatgccggcgatgtaacaagtagtgatttgcatgagattgaatctgatgctgagtgggacatggtccagggagttttaaatactttcttagatgatgaccgcttgagtggtaaataataaaaagaggactggctgtggctggtcctttttgttagttttagaaaaaagataaaaatgaacaagaaaatattagagattttagaatttggcgaaattactaagcgcttgagtaaattagcgattactggtcccgctaaaaaagaagcggaggaattattacctagtggtgattttgaacaagtacaaaatgagttaaagcagactttagctttgactaatttgctacgaattaagggacaacttcctttaacggactttcaggacgtacgtccaagtactaaacgtttaagcgtgaaagctaatttaaatgctaaggaattaggtaatttattattagtattaagtttagctcatgaaattaatgactttttggcagaaatagatccaaacaaactggatttaactgcaattgatgaaattttagatcaattagatgtgccggatcttttatttagagaattaaagaaatcagttgattatgatggtgaggtattagatacagcctcacatgaactagctcgtttgcgtcatgatatacgttctaatgaagaggaaattaagaataagatggatgcttatactaagggcaatagtagtaagtatttatctgagcaaattgtgactattcgtgatgatcgctatgttattccagttaagcaagaatatcgggcaaaatttggtggggtagttcatgatcaaagtgccagtggtcaaacactgtttatagagccggaagccgttttaaatcttaataaccgccaacagaatttaattgctcaagaaaaacaagaaattcgtaatattttgaagcacttatctaatttggctcgtgaagaaattactagtttgaataatattgcggctgcattaactgaactagatttcttgcaggctaaagccaagttagcaaaagaaatgaaggcaagtgagcctcgtctgacacaagaccattctttgaacttattaaaagcgcgtcacccattgattgacccagaaaaggtagtacctaatgacattcgtttaggtggtgaatttgatactatgctgatcacggggcctaacaccggtggtaagacaattaccttaaaaacagcaggattgcttcaattgatggcacagtctggattatttatcccggctgaagaaggtagcaaggttggcgtctttaagcaagtttatgctgatattggcgatgaacagtcaattgaacaatcgttaagtactttttcatcacatatcaatgacattattgcgatcatgaagaatgttgattctgagaccttagttttaattgatgaaattggtgcagggactgatccagaagagggtgctagtttggcaattagtatcttagactttttgcgtaaaaaagatgctaagatcatggtgacaacgcactatcctgaattgaagctttatggttataatcggccacggacgactaatgcctcaatggaatttgacttaaagaccttgtcgccaacttatcatttgcagattggtattcctggtcatagtaatgcctttgccattgcccgcaagctagggatgcgtgaagatgttgtcaaaaatgcccagaacttaatgtcagatgaagattctgatattaataagatgatcaccaagttgaatacgcaaaccaaggcagctactgtggctcgcaatcgtctgcaaaccagtttggatcggagccaaaaattggagcaaaagttgcaacaagcacttgattggtataaccaacgtgtacaaaaacagcttgattttgcacaagagcgagctaatgaagttgttgccaaacgccgtaaaaaagctgatgagattattgctcaacttgaaaaacaaaagaacatgggcgtcaaggaaaataagattattgaagctaaaggcgaactcaacagtttagagcgtcaggctaataatttggctcataataaggtcttacagcgtgaaaaacgtcgtcaccatgtaagtgtaggcgatcgagtaaaggtcctctcatatggtcagacaggtacgattactaagaagttatctgaacatgaatatgaggttcagatgggaattatcaaagttaaggttagtgatcgcgatattgagaggattgaaaagggcgaaagtactaagcctagacaaactgttagagcaaccagtgcggttagaagaagtaatgctcatagcgagctggatttgcgaggccaacgctatgatgaagcaatgactaatttggaccgatatattgattctgttttactggcaggacttgatacggttacgattattcacggtattggtactggtgcgattagaaaaggtgtttggcaatatctccgcagcagcaatcatgtaaagaactttaattatgcaccagctaatgaaggtggcaatggtgcaacaattgtacaattaaagtaagcgtcttacttgcaaaaagtaagtataatagaatatacttataatataaataaatgaattgaaaaaatgtgaggtaataattatggttgaagcaattaatgatcaaaattttgaagaagaaactaagaatggtgtagcattagtagacttttgggcaacttggtgtggtccatgtaagatgcaatcaccagtaattgatcaattatctgaagaacgtcaagacgttaacttctacaagatggatgttgaccaaaatcaagatacagctaagaatttgggtattatggctattcctactttaatcgtaaagaaggatggcaatattgtagaccgaattactggttacactccaaaggaaaagttaaaccaaattttggatcaatatactgattaatttaaaaatcaaaaaaagcttgagacgatgttgcctcaagcttttttgatatatcacttattttgatttacttgcttttttagcaagtcacgaatttcttctaaatagtcggcctcagttggaccagcttctttttctttcttgggcattactctatttaaagccttgatcattaaaaataccacaaatgaaatgatcaagaagttaatgacagaattgatgaagctgccatatttaaatgtagcatccccaaccttaaaaacgaggttagaaaaatcaattttgccggcaaagatcccaagtagggggttgatcaagttttttactaaagattgtacgatagcagtgaaggcagcaccgatgattacaccaactgccatgtccattacattgccacgtgaaataaactctttaaattctttaatcatgctctactcctatatctaatatatctaaaaaaatgcgattttaactaaagtatatagtagtggttatttatagtctatcaatttgcttttaaccgaagcgagcgataaattgaactttcttttctttatctaaaatattaatttcacattcggtggttcgaccagttgatttttgaaatgcttccgcgatcattccgccttcaagggagaattccttgctggcgctattcaaacgatcagtgacagtttggccacttaattcgtaagtagtaaatgatcgtctttctttaactttttctagcttaccaaattcagccatgttgaagaattcaactaaatcatcataatcacttaaatcatattttcgcgcgattctcttgccagcccaataaagaattgaggcgtcatcatcgcctaaaatagttggcaaaaggaaatcgcggtaaagttggttaataaaatatacgtgctcgtttgtgttttctgtgttttctgtcataaacttgttcatcccttttattcttttttattttaccgtaaactagtataagtagaaaataaatttttgattttaagagggttttattatggataatcgtccgattggattattggattcagggctaggtggcctatctgttgcaaaaaaagtaattgaaaaattgcctaatgaatcaactgtttttattggtgataacgctcatatgccgtatggcgatcgaactaaagaagagattattgaactagttagaaaatcagtccattttttgttagataaaaatgttaagctgataatttttgcctgcaatactgcgacagcaatggctatgagtacgattcaagcagaaatcgatccacaaattatcggagttattcagtcggggagtttggccgcttcacggacaactaagaataaaaaagttgcggtagtttcaactaaagcaacagcagaatcacatgcttatgctaaagagatccgtttccgtgatccagaaattcaggtaacggaattagctgctcctaaacttgcaccacttgtggaggctcaaaaagatcatgaaaccaacttaaaagtagttaaagagagtttgacccccttacaaggaaaagactttgacactttaattatgggctgtacgcattatccattgattcagaaagaatttaaagaagcaattaatgataaaaatgttactatcttggatcctgcagatcaagttgcacagtatacgtttaatgtgatgcggcgcgatggtttgtttagtgatggtaatgaaaaagtcagtcatgaatattacactacaggcgatccaactagttttgatcatttagcaaggacattcatggatgatgcaactttaacatctaagcatgtggatacggagaatgaataatggttaaagaaattttatttgcgactggtaatcaaggtaaagcaaaagaactaaaagaagcctttaaacaagctggggtagatatcgagattaagacgaatgctgacttagacaatccgcctcatccgattgaaagtggccatacgtttgaagctaatgccaagattaaggcccatgaattagctgagtttagcaagttgcctacgattgccgatgattcaggtttaatggttgatgccttaaatggggagcctggtgttagaagtgcacggtatgcaggcgaagctcacaatgacgcaaagaacaacgccaagttattagctgaattaggcggtgtaccggatgaaaaaagaacggctaaattttggactacgattgtagtttcgatgccaggtgaatttgataaagacttggttgtgtcaggtacttgcagtggtcgtattttggccgcaccacgtggtgaagatggttttgggtatgatccattgttttatattccagaaaaagaaaaaacttttgcacagatgactactgatgaaaagaatgagatttctcatcgtggtaatgcagtgcgaaaattgctccaagaattgccagcttggttagaacaatttgattaaggtaaaaatagctcagttcgggtcattcgtatgatttgaactgagttatttttagtgaaatgaggtggatatatatgtcaaaaagtattggggaagcgctgaaagaggaaagacggtctttaggattaacacaggaacaatttattaaagggattattagtgaatcgttttattcaaaagtaggacgaggtaagaatgaaatagtagcagtagatttactaaagattttagctgctaataacattagtgaagaagaatttttaaataaactaaatgttaaggaaaataataatttagaggaagacttaaaagttcaattacttaatgcatattctattcatgataaaaagaaaatcagtatgttagtcccaaaaatacaaaatgcagctatggatgaaaatactaaaatatcagctcgtttgattgatgcagttgtaaataataagattaatgatttaactcaaagagaaattacacaaattaagagaaaattttttgaagttgatgattggaccaaaaatattacaaccttacaacttttttgtaattcaatgcttttgtttgattttgatgagctggttctttttgtaaaaaaactggaaaaaacatgtaaagggaagttgatgaaattaccatttaatactcaaaagataattgcatcgatttgcataaattattttcataattgttatacaaatgattgtagtcgaaactgtcaaatcttttgtgtaaatagttctttctcgtaaattgattttttaattatttatttaatcaaagtaggattctaaggtgtcctgaacctgaccaaagcctttatgaattcgattgaaataacggtcattgtagctcattgcctgaataccaataaaagcatcaagcgactgttcagttggaaactctgccttaggcttagctttgcgcttgatcacattgttaaatgattcaatcatgttagtcgaataaattgaagctctgatctgcttgggatagttataaaagaccagcagatctggttctatgtctttcaagcttctgataacatggctgtaaaccttgccccatttggtatagaagtcatgcaggacagctgtggcttcttctttgtttgtctgttgatgcacctgtttgaattcgttcatgatcttttcacgatcgtcgacgcgtactttagcgcagatattgcgcatgacatgaaccaaacagcgttgaaaatgagctttaggataagtcctggccaaggctgttttcatgccaacaacaccatcagaaagaaagagttcaacttgcttcaagcctctggacttcatgttttgaagcatctctgtccagacttcaatgttctcactaggagcaatgcagtagtcaatgacttccttatgtccattaggtttaatgccaatggcaatatatactgcttcacgctcaaacgtttctcggcgcaaaggaaggtatgtcgcatccaaatagacacagaaaaacttgtcgcttagcttgcgcttgtgataagcctcaaccttggggagcatctgcttggaaatatttgatacctgagctggactgtaatggctgccatacatcttttcaattagatcggctatttccctggtggtcacgcccttggagtaaagcttgataatcatgctttccaagatatccgagtgctgcttgtagtcaggcagcgtgtgctgatgaaattgaccgttgcgatcccgaggcacttgcacttcaattgggccaaattgcgtatcaactttgcggaaataagcaccatttctagagttgccagtattccagccatttctggcatagggatcatagcccagaaaggcagtcaattcagcttctagcaagttattaacagcctgttgtagttctttgcgcaataaatcatttattttgtctggattgaatagagcttgagcaaaatctttggtaaaatcattcatgaaggagttcttctttctgtatgtgttttttttgttcaaaccaatcatacgagaaaggaactcctttttctaatgtttaaagaaataaatttaaggaatcattcatccttacacaaactattttacagtctcaagatgcaagctatggttatgaaataatagaagaattagctaatattccggattttggaatatatgtgatagttactaatttttataaggcatattttcaaggcaataaaaagcaaagtcaacagatattagatttcttgaatcagaatggactaaacgaaatatctagcagattgccatagtcatatatgaagacttaattcaaatatgaagagtattagatttttttaatgtttatactataattttaataattaatgtaactcttaggattagcctaagggttattttagtaacaaaattatttatgtggagaaagaaaaatgagatcgcaatatttccaagccacttttcgaattgcacgtaagtcgaaaaagaatatgttgcttgctgttttattggtactttgcatgatttttgctgtactggttgtagaaaagcagaaaatcaacgatggctaccgtcaatggcgagactacaatgagtcagttcatgttaatgcagattatttttctagcaatttgctacgaaaaaaggattacaaacaaacttttaataatctgaataaacaggctgagtatttggccggtgtacaaaatggtgaagtatttgattcgcctcaagattatttgcaaaattccaaaaagttagtgcaaacgatgctggcgggttatcaaaataattatcgcggtgcttcaacgctaaatgttccaccgaagtatcaactgcaacaaaaattagtagtttatgattatttgtaccaacatcacttagcaattgtcatgaattctaaagaatctagcacctacttaatctatattttaggattagtcggcatgttcttatttttctacgttttatttattgctagtgatagctggatgattaatttatcacatccaactctgcttaaaaatattccttatcagattagggatgaagttgaaggcaaatttatcatcaatcttgctttgactttgcttccgttagtgattggtgtgttaggaagttacttatttgctggttttaagaatggctttaatagtttgaattatccagcagttttgtatttcggtaaaattagcgcggttccactgtggctttattgtttgttgtatttagtctatgcagttgtactagtgatgtttgtgactagcctggcattgttgcttaatcaattaactcatagcgtttatctaacgatttttattgcggcattggtctacagtatttcacttttaccgggtagcattgctaaatatcttttctttttaccttcagcttatctaaatatcagtaaggttttagatgggactgttgcaagtcaatcaattattccggcaaattgggcagttggtatgactattttactagtgtgggctgtagtgctggtaatctggttcaggcatttggttaaccaaggtggtgttgaaaaatgaaaaggcaatattttttatttcaattaaaaatatttttgactaatcctaaaaatgtggggctgtttttcattaccgtcgtgcttgcactttactttggtttagtcagcgcaccgcagcatcatgtgattgaagatgttgatccatatgcaatttcaaaagaatatcaagatgatcaagcctttttaaaggtggctgaaaaagaatttgcacgggcagataaaggtacttcggattatgatcccagtgaaggtgctaaagatgctgttaccacatatccgaccatcattaagtatgaccatgagcgtttaaaagcacttaagaatcatgattggcgtttgtataccaaatacagtagcaagtggtatcagaaaatggataatttgatttgggttaaagaaaatcagaattacatgtatcccttggaatactaccacaataataattacaaagaagatggacattttgggtatcaaagaacatttcacttctatgatggtttacttaaaagtaaagcaaaattagacaaaaatgttttagaagaacggactactttacagagattacagcagtcgctttctgggtggacgatgattattttaattgtgattgttgttttgtttgcggcagatatgataaccaatgatcaaaaataccgtacagtagtgaagaatattcctctttctaaaaggacaattctttggctaaaaactgcggttattgaagtgggaattttatttaactttctagttgcttttttagtcgttacgttgtgtactgcgccaaggtatggttttggctcctttaatttattaacgccaatttatactggtcgtctgtatttcaaaacgccctttgtttatcagacgctgggacaatattatcttggtttcttgatctttgcagttgtaattacctttattttcattagattgactttattattgtcgctgatttttagaaatgaatatgtagcggctattatttcaagtgttttggcaatgagtgctaaagttctttatttttcattgggtatgggctttgtttatccatttttgaaacacttaccaatgacatattttacaatcggcgaaagtttgactagtaatttatcgtatttaatggactcaccaggttgggactttaatgatgggattattccgttagttacattagcaattgtaattgaattaactatttggctattttgtcagtttagaaaagtagtattagtgaagtaggtgaaaacatgttaaaaattcataatgttaaattagcttttggcgaacatgttgtcttagatgaaattagtttaaattttcaaataggaactatcgtaggtttagttgcaccaaatggtacaggaaaatccacactactaaacgtaattttacataatcttgagccacaagctggttatgtagaatatgatcatttacgttatcgcagcaatcgtgagattattaaactgcatcgactgatttgtgcttttcctgatcaaagtgatctgtttccatttatgagcggtagggatcatttaaagctttatgcggatctttggaaaaattcggataaaaatgtagataatattattaataaattacagatggaaaaatatgttgatcgcccaacacaaacttattctttggggatgaaacaacggctttgttttgccatggtggttgcagctgatacgccagtaatgcttttagatgaggtgatgaacggacttgatccccaaaacgtacaattgatttcagattacttattagatctaaaaaaagaaaataaattgattattatggcttcacatttgttaaataatctacaatcttacgcagatcgtgtacttttcttgaaggcaggaaaggtaattgaagatctcgataatcaacatcaggctaagcagtatctgaaaattgaggcgaatgcaatagccgggacgcggttaaaagataaaagatttactaagttacctgataataaaattattgtgccactggatgataatctaggattagatcaacttatacttaaattgactaaagagaagattccatattcagttggtcgaattgatttggcagaattatttagtaaattttatggctaaggcaatttgattagataaaaatagctcagttcgggtcattcgtatgatttgaactgagttactttttacttattttgcagtagtttttgcaggtcgttctgtacttgcaaaagcaatattattttctcgtaaaatttgaatatattgggtcaaatacaaatttttcacagcagattgtttaccaggcttaacttgaaaatgaatggaataaacaaattttttccctgtttgttcggtcacaccgacaatagtaggacctgatacaattgtctttttctcaggctggatcttacgattgcattctttgattaacttgttaacttcatcaatatcgtttttggtatcaagatccaaattaatgtctagtgctacaccgccatgggctaggttttgcacaatggtaatgttgcggttagggatgaaaataattgagccatctgaacccttgagacgagtagttctgaggcctagttgcacgacggtaccaacattagtgccaatctgaactaaatctccaacatcaaattggtcttcacttagaataaagaaaccgttgaccaaatcactaacaaagccttgtgcgcccattcctaaagctagggaaaaaattccagcactggctaacaaggtgccaactggtacacctagaatagagagaataccgaataaatagaagaagataagggtatattgaaaaacgctgttaatcaaagctgtgatagttcgagttcttttattcttaactgtgttatgcttggctaagtaattattaattattttatgaccaaaatgggataaaaggtaaaaaatgagtgaagtaatagctaattgccaaataattgacaataaattttggctaattttactccaatcaatttcaattttctgtatatttatgtgagtaggaatcttcatttggtgtcctttctattgcttacgggtataattaagaataacaagacattaattgagaataaaggatattcatgctaaactttttttagatgttgatggaggtagaaaatgacaatttcttatggtgctttagcaggcttaattgcggcgattgcattcttaattttagtattatttacgattccaatgctaattcggaccgcgaagttgttgaaagaaactagtgcaactattcaaacaactaacgagtcaatgaagaaaatttctgaagatatggatggcttgatggatcaaacttcggatttgttagataaaactaatgacctaatgaccgatgttaatggtaaaatgaagacgttagatccagttgttaaagctgctgcagatttaggcgaaagcgtatcagaattaaacgattcatctaaaaagatcgctaaacgctttagcagcaatcatttaagccgtacgggtcttatttcttcaatagctgcgacggcatttgcaagacgcaagcgtcgcagaggtgaaaattaataaaggaggaattcaccatgaaaaaattcgcaagtttcttattaggtgccgttgcaggatgtgcagcaggttttctcgcaggttcacttcttgttagtgatgaacaagttgatgacgttaagaacaagattaaagataatgacaagcttcaagatttgaagaagaaatacgataatggtactgaaatcgttaagaatcaattagcatcattccctaagaatgttgaagatgattcagaattgaaggattttgacgacatcgtaatcgatgactcaaataaagatgacgatgacagtgaaaatgctgaagagtcagttaacgatttgaacaatgctgaaaaagatgatactgatgcagcatctacttcagaaaaaccacaagcttaattaaagtcaaaaagaaaaggagctggtcgtgatgatcagctccttttttatgactaaaattagtctttaagtggtaaaacttttaagtctttgtcagtgtgagtaaaggtttcaaagccgtccttagtaacgacaccacaatcttcaattctgacaccagcaaagccagggatgtagatacctggttcaatggagaagcacattccttcttcaagaactaagtcgttaccttgtacgattgatggatattcatgaacgtttttaccaatgccgtgacctaggcggtgaatgaagtattcaccatagccagccttagtaatgatgtcacgagccacgctatctaattcttcagcggtgattcctggcttagcagcttcgattgcggcttgttgagcttcacgatcaacttcataaatttcgcgttgcttagcagtaggttcaccgtaagcaacagttcgactagaatctgatgcgtaaccatcgtgcatggtacctaagtcgaataaaactaattcatttggttgaacagtgttcatagttggaccaaggtgaggattagcggcgtttttaccagcttgtacgatggtttcaaaactttcatgcataacacctttttgaatttttagttggtaatcaatttgaccagcgatgcttctttcggtgacgccagttctaattgcgtcaaagccaatcttaaaagcgaagtctgcttctgcaccagcgccttgcaacttcttgatttcttcaggtgtcttgtaaagacgaattttttcaataaaaggtgaaacatcattagtaaaactagcgttaggaaattcaccacgtaagagttggtagtgggcaacagacaaatcatctttttcaattgcccaattatgggtatcgtgagttctctttttgacattagttgcgatgatgctccaaggattctcggaatcaagatagccgataacatcgccatcccatgcagatgcttttgcttcttctacgtttaaagctgggcagaaaataaatggttccgcatcttttaaaacaattaaagcaaagattctctcatgtggttccattgagtaaccagtaaagtaggaaatggtgattggattagaaatgtaagcaagatcattattggagtcttgcaaccattgttgtaatttatctaagttcatattgtcctcttttcttgcaaattatgtttactgtagtatatcatgatctcttaatgaaaaaatgaaagaaaagctgtaaacgtttgcattttatgcagcatcgtgatatctttaagtgaaggattttttggaaggactgagagataagagatgcataaacaagaagttacaatctatgacgtcgctcgggaagctaaggtttcaatggctacggtttctcgtgttgtgaatggtaatagtaatgttagaaaagagacacgtgaccgtgttctcgaagttattaaaagactgcactatcaaccaaacgctgtagctcaaggtttagcttctaagcggactactacagtagggttaattgtcccagatttaactaatttatactttgcagaattatctaagggtattgatgatattgcacttttatataaatacaacatcattattactagtattgaaaaccgcttgatgaaggaagaccaagttattcaaagtttgctgaataagcaagttgacggtgtaatttatatgtctaaccgtttatcagatgcagcagctgatgcctttaagcggactgatactcctgtggttttagcaggtactaaagacaatcgtgatgattttgcttctgtcacaattgactataagaaggctgatactgaagcattaaatttgatgtaccatgatggtaagaagcatttgggaatcgtagttggtgatcaagatgctgtagttaacagcgaaaacagaatccctgcttatgaagaattcatggaagaaaatgatttgggcactcctcgaatctatactgatattaaagactattcagatggttataatttatacccacaattagttaaagatggcgttgatggtgtaattgttactcgcgatatttcatcagttggtattttgaattctgcgatggatgcaggtaagaaagtgccagaagatttggaaatcgtgaccgccagtgctacgcagttagcttctgttgttcgtccagctttgactacgattaagcagccactttatgatatgggtgccgtagcaatgagaatgttgactaagttgatgaacaatgaagaagtagatgatactcatattgttttgccatatgaattagttaaaaagcaaagtactttaaatcaataattaagtgaagcaaaaaagaccagtttactggtctttttgttttagtagataattttgttaatctgttgaagcttttgtgtaaaagtggttggtgcaattgcttgattaggattatagggcaaaagcacgagattagtgtactgactgacccgtggtaaggactgataatctctgaaatcgtcttgactaaagaagccatagaacaagatatcttttgccttaacccaacctagtttggtataaatccacatgtttttaggactaccattaaaattttgaatttttaataattgatttgcgggtaatttttgctgcgttttggcttggttatcaggataacgataaattgtaactttttggttaggtttagcgataattttcttattttgataaggagcaatatctcgctttgttaagtcaaaattaacgaattctgccgaaataaaagttttttcagcaatttgataaaataagcgatcatctacacggacgccataagtgacattgactttttgacctggttgcacgtacttcttttctttgatgcgaacatacggattcatcattgtagcggctttagttttaccaaaataaattccagttctattaatagcgtactttttagtgccacttttggctaatttatatttaaaaccagtagcgggatagttggtaaccacgccatcaacattccgattaattagccaatgccatagggcaggcgattcgtccatttcggcccagacaaacagttgcttatgtaatttgtgaagccagtgaattaaaaagggatgctcttgcacaatgtcagaagaagcattgatagcattaacttgaggtaaattactgaaattaatgcgtttcaggctaccaacgatcaaaattagataagcttcaggcataatttttctaaagtgaaagagactagcagcggaaaatgaatgaatcatgattcttttctgcatatggtattttttaactatttgtgcgattttatcctctaactcataggacggatttaatccatgatcaattttagtctctaagacaaatttagtgtttggtttattttgataatgcttaaaaagctcactgagtgacataacgtgttcgccattgtcatattgcagttgtttaagtgctgtaaaattattttgtgatacaattgcatgtgtatgagtaactcggaagaggtcatcatcatgtgcaatgaccggaactccatcctttgagagctggagatcgagttcaacgtaatcagcaccagaattaaaggcggaatcgtcagcctgaattgtttcttcaggatatttgatgggatcaccacggtgccctacaactgtaaaaccactatttatgaaaaagactaagctaaaaaaaagaacccaaacgagtcggcttttaaatttcatgtgtacacctctatcgcatacttaacaatagcatggttacacatttttttctatttatagtactattcttttatcagtaatcggtatgattgaaatctaaaggatgagatttaatggaacaattggacttaattgaagaagttaccagaaatgatggcagtcgatattatgaaatctctaatattgaccaaaatggaattgcagaattagctgcagatcatggcttaattaaaaaagtcaaaatactgcagctgaatattcctcgaactaaggcactgattgcttatgaaaaatatatcaatgatacttatgacttgcagactttgactaatgaaagtgattggaaaaatccaaaatgggtagaatgggataaacctaagggaaaaattttagacgcatataatatgatcttaaaagccaatcgaattggttagaaagtggcataaaaaatggaacaactgcgaattttacataccaatgatcttcattcacattttgaacatttccctaaaatcggacgttacttgaaaaaagcgcaggctgatcaatcggttgatggtatctacacttttgatgcaggagactttatggatcggtctcatcctttaactgatgctacggaaggtcaagccaacatcaaattgatgaatgggtttaactatgatgcaattacgattggcaataatgagggaatttctaatccacattgggtattggaacatttatttgatcatgcggactttccgacagttttagcaaatttgcgtgaagaagatgaatcaatgcctaaatgggcagtcggccatatgtttttaactactaagaaaaagacgcgaattgctttaattggcctgactgcagcttatccaatgacttatggtcctaatcattggcatgtcaagatgttaggtgacagtatggatcacgaattagctcaaattgaaggaaagtatgatgtcttaattttattgactcatgttggattaaaaatggatcgctggttagctaaacattatcctcaaattaatttaattgtaggaggccacagccatgatctgattgaacatggtgaaaaagtggggcatacttggattacgcaaacaggtaaatggggaaactatgtgggtgatattcatctagaacttgaagatcatcacgtgattaaggtagtacctcgcactatttctactgcttcgatgccagaagaaccggaagataaggcagtgattcagggctactatgatgaaggtaagcgacttttatcagaacgaaaagtggctaatttacctgaaaaatttgcggatgataaagtagcagccgttcaagtttctcttgatgcgattgctgattttgctaaaacagatttagccattttaagctcaggcctattcttgcccccgtttaagagtggaataattactcaatatgatttacaaaatgccttaccgcatccaatgcacgttgttcgttcaaccttgaaaggttatgatttgtggcgactagtgatggaaattgaaaagaatcggcattacctagaccattttccactgcaagggatgagttttcgaggaaaaatttttggtcagatgtattacaaagggatcaaggttgatatgcgtagacgtgtagtttacgtcaatgggcatgaaattgatccacaaaaagaatataaaattgcctgtttggatcattatgtcttagttccattttttccaactttggctattgtcggtgaaaatgagtttttattcccacaatttttacgtgaagttgttggtaaatatttggctgaaaaatatcctttaacagcgagaagtgaaaaagatgactgaagaaaataaatttgaacaagaacagccaattagacacccacttgctgacgtggtgcaagatggtaagagcattaagattggtgcgcagctttatagcatcattgtcaatgagcgagacgcacttgatttagaatctttgcgtaaaaaatatgatccttatcttgaccagtatgattatctggtgggggacgtttctagtgaacatttacgcttgaaaggcttttataaagacggtgctagaaccgcaattgataaaaaagaaatggcgatcgtggattatttaacggaatattgtaatcccggcggaccttattttatcttggaattaacgcatccagtacattattatcagcatcaacgtactaaaatacggcgatcacgtgaacgacgcgagcgcgattttggtaaaaatgagcgttatcatgcacgacgtcgaaattatcggaagaataaaaatgaaaataatccgtttaagaagcggcgtgttcatcaaactaaatttaagaaaaaaacaatcaattgcagtgaaaaaagaatttggacggcatcattcatttattattaaaaagagaaagggaaactagtgaaagattaccgggtatttttaattgacttagacggaactgtttatcgtggtaaggaaacagttgaatcaggagtaagatttgttcatcgtttggttcaagcagggaaagactatttgtttttaaccaacaatacgaccagaacaccgcaaatggtagttgataaactaaagggacacggtatcgaaactgatacggaccatgtttatacgccaagtatggccacagctagctatattttacaaagagaacacaaggaaaagatcggcttgtatattattgggcagattggtctctggcatgaattattgcaacatccagagtttgagcttaatgaagaaaatcccgattatgtaattgtcggtatggatacagatctgacttatcataaagtacgagtagcttcacgggcgattagacgtggagccacttttattgggactaatgccgatatgaatttaccagcagaggatgagctaattccaggcaatggttcacaatgtgcattcgttgctgcagcaagtggagtagagccactgtatattggtaagcctgaatcaattattgtaaaaatggctttggataaagttggctatagcaaagatgaggcacttttggtaggtgataattacgataccgatattaaagctggctttaatagtggagtagatcagttgttgactttgacaggtgtgacgaccaaagtggatattgcagataaacgtcaaccaacaattttagttaataacctagatgaatttgaattatgattactaaaaacaatattttttcgctgatttatcattttttgtttgctgtttctagcagtgtaattggggcaattgtggctagttggccattattgtttatttttatgatcgtacaaaagacatatgagacggttcacatgtctttgtttaaggtaatgcataattataaccagctgatgttttatttgctctggccctttaaaaagcagcttaaaatggataatttccctacatctgctaatgcggcagaacattttgcggaatgtaagcatttatttattctgactctattagtttttattatctgcatcatagtgcactttgtttttaaacgacaaaagaaaaagctactgcttaatttggataaatcagtagcccttattttgctattattgccaattattatttttccatttgcagtaaccaatttcgacagtttctttgtgatttttcaccatattttgtttaacaatagtgattggctgtttgatcctaatactgacccaattatcaatgtgctaacggaaggcttctttgcttcttgttttgccgttgctggggttatttatgaattatattttgctgaaaaattattacgtaagtaaaaaagagttccttagtggaactcttttttgagtgatatttttttcttgattgcgacaattgcgattggcacaactgatactaaaatgatagcaattacgatcattgaaaaatggtcctttacaaatggaatattgccaaagaagaaaccgatgattgtgaacaatcctgtccaaagcaagccacccaagatgttgtaggtgataaatttaccataatgcatcttactgccgccggaaatgaatgggacaaaagtacgaataaatggtataaatctacctataacgatcgtaattggtccgtggcgctcaaagaacttttcagcggccaaccgattattttgattaattaatttattgaaccagctatgtttttcaccagctctggttgaccaggcaccaatttcatagttgatactgtcaccgattatggcggcgaatgctactataagataaactagccaaatatttaagccatacttaggattagcagccattgcactcgcagcaaaaatcaacgaatcgcctggaagaaatggaaaaacgactaagcctgtttcaataaaaatgatagcgaataagattaaataggaccaaccaccgaattggttaacaatcgggattaaatggtcatcaatgtgcaaaataaaatcgattaaactcatctggaactcctaaaaactagttgaatgaattgtcaaagttttttcagggaaaagatcacgcataatcgcggtgattgcaatctgggcttcgccaaaaccgagagcgattaaagggacgcgtccaagataggtaacaacatcgccagctgcataaacaccggcgatattagtttgcattgttgaattcaccttaatttgtgcgccagctaaatcgattccccattttttgacaaagcgattattagctttaaagccatatgcaacgactgcttggtctaacttgatattagttaagctatcttttcccatttcttttaaattaacgttcagttgattatcaaccaaattgatttgtttaggaagataaggagttaaaatttcaacattttttaaagacttaagttttttgacattagattcaagaccgcgaaattgattacggcgatgaatgattttgacattggcataattagctaattctagtgccaggtctaatgctgaatcgccgccaccaaagacgccaactgtttgtccgacaaattttgggggatctttaataaagtaatgaatccttttttgagtatcatcatccatagataatggtaaagctttaggtttaaaggcaccggcaccagtggtaatcaatatgctgcgggatgcaactatatcatcgataataaagccgtctttttgtttagtgacattttcaactttatggttagtaaaaatagttgtatccgttaaattatgtcgtaaattgtcgattagttcagttcctgtaatagagtcgtaagcaggaatatctttgattttcttaaaaggataaagcatttgtggctgtccgcctgtttcagataatgaatcaaacagtacggtcttgagtccatgaagatgggcaaatcgcgcggcaaataggccaacaggtccgccaccgataatagttaaatcaaattttttaattttaatgacctcctcaaagtagtgatgtatcaactttaacatgaattttgtaaatattcatttaaaaataagcttgtcaaaaaatgaattttaaggtatattattgaagtcgcctttttaagagcgagcataattctttattgaaaaaatacttgcaattaatattcaagtattatatattaataaagtcgcttcgagagatgcgacgagagcttaaaaacagacatgcaaggaaagaaaacaaataaaaagaaaaaagtacttgcaaagaagtaaataagctggtaatatatttaaatgtcgtcaggtgaaagcagaaaaagcttgagcaagacaaaaaaacaaatcaaaaaagttcttgacaaagaaatgatggtttgataaaatatgaaagctgtctgctttgcaaaaaagcaagacagaggtagtactttgaaaactgaacaaagtttcgctaaaagtgtgcgggtgtaaaaacccaaacaagaagcgaagtcaattcgcaagcaataaatttgagacaaagatcttaaataaggaatgagcaatcattcaaactttttaaaatgagagtttgatcctggctcaggacgaacgctggcggcgtgcctaatacatgcaagtcgagcgagcggaactaacagatttacttcggtaatgacgttaggaaagcgagcggcggatgggtgagtaacacgtggggaacctgccccatagtctgggataccacttggaaacaggtgctaataccggataagaaagcagatcgcatgatcagcttttaaaaggcggcgtaagctgtcgctatgggatggccccgcggtgcattagctagttggtaaggtaaaggcttaccaaggcgatgatgcatagccgagttgagagactgatcggccacattgggactgagacacggcccaaactcctacgggaggcagcagtagggaatcttccacaatggacgcaagtctgatggagcaacgccgcgtgagtgaagaaggttttcggatcgtaaagctctgttgttggtgaagaaggatagaggtagtaactggcctttatttgacggtaatcaaccagaaagtcacggctaactacgtgccagcagccgcggtaatacgtaggtggcaagcgttgtccgaatttattgggcgtaaagcgagcgcaggcggaagaataagtctgatgtgaaagccctcggcttaaccgaggaactgcatcggaaactgtttttcttgagtgcagaagaggagagtggaactccatgtgtagcggtggaatgcgtagatatatggaagaacaccagtggcgaaggcggctctctggtctgcaactgacgctgaggctcgaaagcatgggtagcgaacaggattagataccctggtagtccatgccgtaaacgatgagtgctaagtgttgggaggtttccgcctctcagtgctgcagctaacgcattaagcactccgcctggggagtacgaccgcaaggttgaaactcaaaggaattgacgggggcccgcacaagcggtggagcatgtggtttaattcgaagcaacgcgaagaaccttaccaggtcttgacatctagtgccatttgtagagatacaaagttcccttcggggacgctaagacaggtggtgcatggctgtcgtcagctcgtgtcgtgagatgttgggttaagtcccgcaacgagcgcaacccttgttattagttgccagcattaagttgggcactctaatgagactgccggtgacaaaccggaggaaggtggggatgacgtcaagtcatcatgccccttatgacctgggctacacacgtgctacaatgggcagtacaacgagaagcgagcctgcgaaggcaagcgaatctctgaaagctgttctcagttcggactgcagtctgcaactcgactgcacgaagctggaatcgctagtaatcgcggatcagcacgccgcggtgaatacgttcccgggccttgtacacaccgcccgtcacaccatgggagtctgcaatgcccaaagccggtggcctaaccttcgggaaggagccgtctaaggcagggcagatgactggggtgaagtcgtaacaaggtagccgtaggagaacctgcggctggatcacctcctttctaaggaagcgaaggatatggagagcaggaatgctaagagaagtatccagagcaagcggaagcacactgagaaactttgtttagttttgagggtagtacctcaaagattggaaaaacgccaagcgttagtcgggcctatagctcagctggtttagagcgcacgcctgataagcgtgaggtcgatggttcaagtccatttaggcccattgacataacgaagaaaaagagttaaagttatgtctggccgaaaataaaatactctgggggcttagctcagttgggagagcacctgctttgcacgcaggaggtcatcggttcgaacccgttagcctccattgatccagaaaaaggatcaaagagctagtacattgaaaactgaatataatccaagcaaaaaaccgagacaatcaaagagaacagattgtagagcgaccgagaagagaattcttgagtaaggtcaagtagaaaagggcgcacggtgaatgcctaggcactaacagccgaagaaggacgtgacgaactacgaaaagcttcggggagcggtaagtacgcagtgatccggagatatccgaatgggggaacccaatgcagagatgcattattgattagtgaatagatagctaatcaaaggaagacgcagtgaactgaaacatctaagtagctgcaggaagagaaagaaagatcgatttccttagtagcggcgagcgaagaggaaagagcccaaaccaagtgatttatcatttggggttgtaggactgcgacgtggcagtgtaagagatagttgagttatctgggaaggtaagccagagagggtgagagccccgtaagcgaaatctcaagcacgcctagcagaatcctgagtaggccgggacacgaggaatcccggttgaaaccgcgaggaccatctcgcaaggctaaatactagttagtgaccgatagtgaaccagtaccgtgagggaaaggtgaaaagaaccccggaaggggagtgaaaaagaacctgaaaccgtgtgtctacaagtagtcaaagcacattaaagtgcaatggcgtgccttttgtagaatgaaccggcgagttacgttatctagcgaggttaagtcagaaaagacggagccggagcgaaagcgagtcttaatagggcgaaaagttaggtgacgtagacccgaaaccaagtgacctacccatgaccaggctgaaggtgtggtaaaacgcactggagggccgaacccacgtaagttaaaaattgcggggatgagttgtgggtagcggtgaaattccaaacgaacttggagatagctggttctctccgaaatagctttagggctagcctcgtggagaggataatggaggtagagctctgtttggactaggggcccgtcaggggttactgaatccagataaactacgaattccagatatccatacacgggagtcagactgcgagtgataagatccgtagtcgaaagggaaacagcccagatcaccagttaaggtcccgaaatctatgctaagtggaaaaggatgtggagttgcgtagacaactaggacgttggctcagaagcagccatcattcaaagagtgcgtaatagctcactagtcgagtggcgctgcgccgaaaatttaccggggctaagcatagtaccgaaactgtggatgtgttttaaagagcacgtggtaggagagcgttctaagagcggagaagttgaatcgagaggatcaatggagcgcttagaagtgagaatgccggtatgagtagcgaaagataggtgagaatcctatccgccgaaagactaaggtttcctggggcaggctcgtccgcccagggtaagtcgggacctaaggcaaggccgagaggcgtagtcgatggataacaggtagagattcctgtactgtgtcaaatcgttaagagcgaaggagggacgcaggaggtgaagcacgcatcgcgatggaacgatgttcaagcaacaagtgcggttaagagtcaaatgcttctaaccagcaacacgagttgtgaagaggagtgaattaaaagtagcgaaggtgtggtaatcacactgccaagaaaagcttctagccagagatgacatacccgtaccgcaaaccgacacaggtagtcgagtggagaacactaaggtgagcgagagaactctcgttaaggaactcggcaaaatgaccccgtaacttcggaagaaggggtgctagccaagagattggttagccgcagtgaataggcccaaacaactgtttatcaaaaacacaggtctctgcaaaatcgtaagatgacgtatagaggctgacacctgcccggtgctggaaggttaagaggagagcttagcgtaagcgaaggtttgaattgaagccccagtaaacggcggccgtaactataacggtcctaaggtagcgaaattccttgtcgggtaagttccgacctgcacgaaaggtgtaatgatttgggcactgtctcaacgagagactcggtgaaattataatacccgtgaagatgcgggttacccgcgacaggacggaaagaccccatggagctttactgtagcttgatattgagtatcttttaaacatgtacaggataggtaggagccagagaagataggacgctagtcttattggaggcaatgttgggatactacccttgtttgaaggatgctctaacctcgacctgtaagccaggccagggacagtgtcaggtgggcagtttgactggggcggtcgcctcctaaagtgtaacggaggcgctcaaaggttccctcagaatggttggaaatcattcgcagagtgtaaaggtataagggagcttgactgcgagagagacaactcgagcaggtaggaaactaggacttagtgatctggtggtaccgtatggaagggccatcactcaacggataaaagctaccctggggataacaggcttatctcccccaagagttcacatcgacggggaggtttggcacctcgatgtcggctcgtcgcatcctggggctgaagtcggtcccaagggttgggctgttcgcccattaaagcggcacgcgagctgggttcagaacgtcgtgagacagttcggtccctatccgtcgtgggcgtaggaaatttgagaggagctgtccttagtacgagaggaccgggatggacgcaccgctggtgtaccagttgttccgccaggagcatcgctgggtagctatgtgcggaagggataagcgctgaaagcatctaagtgcgaagcccccctcaagatgagatttcctttgcgtaagcagtaagacacctcagagacgatgaggtagataggctgggagtggaagtcctgtgaaggatggagcggaccagtactaatcagtcgaggacttgaccaaagcgaagcaaactggaaggttttttgcgagaaggattatgtttagttttgagtgtaaaagctcaaaagagtacggtggcgaaagcaagaaggatacacctgttcccatgccgaacacagaagttaagcttcttaacgccgaaagtagttggtgggcaactgcctgcgaggaaaggaagctgccgtgctcaatatggaggattagctcagctgggagagcatctgccttacaagcaggaggtcacaggttcgagccctgtatcctccatatcgagtcgttagctcagttggtagagcaacggacttttaatccgtgggtcgagggttcaagtccctcacggctcatgaccctatatatgcgggtgtggcggaattggcagacgcgctagatttaggttctagtgttttcggacgtgtgggttcaagtcccaccacccgtattgccaaccacatattgacaatatgccgatttagctcagttggtagagcatctgtcttgtaaacagggggtcgtacgttcaagtcgtataatcggcatttatattacgcggaagtagttcagtggtagaacatcaccttgccatggtgggggtcgcgggttcgaatcccgtcttccgctttcatcaacacgccggagtggcggaattggtagacgcacgggacttaaaatcccgcggttggtttcaaccgtatcggttcgactccgatccccggcattgatgatgcgcccttagcgcaactggatagagtgtctgactacgaatcagaaggttgaaggttcaaatccttcagggcgcatataacgggaaatggctcagtttggtagagcacctggtttgggaccagggggtcgcaggttcgaatcctgttttcccgattgtaatctaatggtgattggttacattttggcggtgtagctcagctggctagagcgtccggttcatacccgggaggtcgagggttcgatcccccccgccgctataattgtaagcttggacctttagctcagttggttagagcagacggctcataaccgtcctgtcgtaggttcgagtcctacaaggtccataatatggcttttatattaatatcgcgggatggagcagtctggtagctcgtcgggctcataacccgaaggtcgttggttcaaatccagctcccgcaatttggtccattggagcagtggtttatctcgcctccctgtcacggaggagatcatgggttcaaatcccatatggaccgtaagatggctcggtagctcagtcggtagagcaaaggattgaagctccttgtgtcggcggttcgattccgtcccgcgccatttcattttatattaggtgcgggtatagtttagtggtaaaacgaaagccttccaagctttagtcgcgagtccgattctcgttacccgctttatatgggcctatagctcagctggtttagagcgcacgcctgataagcgtgaggtcgatggttcaagtccatttaggcccattggagacatactcaagtggctgaagaggcgcccctgctaagggtgtagatcgggttattccggtgcgagggttcgaatctctctgtctccgtattatgcattttaaagtagctgagagccgcgtggttatgcggttcttttgttttactctcattttttgatagaaatttgatagaaaaagtctttttaaaaaagcccattaatatctttacgaatttcttcctcaccatttttggttgtgtgagtataagtacctagcgttaaatctaggctcttatgtccaagcacatttttaacatctaccatattccaaccattatcattagcaattgtagcaaaactatgacgcaatccatgaaccgtaatctttttaagatttgggttcttttcgtaaatttgctttttccacttgtcagccttactagagcggtaatagtcgcccttagtattgtgaaagacaagtgggtttagatctttacgacagtgaagcgaaatttcatatactaagtctgacataggaacgatgcgggtttcatttcctttagggatttgagtgccataatcgtttgtttctatttctccgttacctttaattttgagcttgtaagctgttgttcgctgaatgtgtatggttttatgcttgtaatcaaaatccgaccagtggagggcaatagcttcgctcttacgaattcctgtggttgcgaggatcaagaagtaaaagtaaacctgatcactaatttctttcgcagtgtctaggaatgattttagctcatcaagcgtatagaagttatgtgatgtatcgcgtcccttaaccgctgacttcttaggcaagagagaagatctggcagggttgcgattaatcaactcaatgtctaccgcgtactctaaaagcttatgcaaatagttaaacaccgtacggtatcttttatactctttagctaatgagtaaaaataatctgatatagttttagtggttagactgtcaacgtaggactcaccgaattcgggcttgatatgcaagttgtataattcgtaagttttctgtgcggttgaaggtttaacgtctaagacatagcgtttaaaccattcgttccatagctgatctacagtatattgcttttgcttaacaaaatcttgaggattggttgcggctagttgcttatatacagcatcagcctcttcatagctcttaaagccacgacgaaaagtttgtactttttgaccattcttttgacccaagtaaatgtaaaacatgtagcgctttttaccgcttttaagcttataaggcttaattgcggtattttttctttttggcatatttttcacctcctttcaataaactaatgttctcgtaatgcgtgaaatataagcccgcttgctcggtagagtaggcgagctattttgtattaagccagactaattaccatttctaacccagttgttcatgctatttcggaaagaatttacgttattttccattgcattgactttgtttgttgaaacgagatcctcaagtgaaagatttttacgttcttggtttaattttctaaatctttgctgtaattcttctttggtaacaaaccaaccgttgtgtcttttaactacaaatctcattcctttagcatagtaaagactaccttttaaaatccaggcgttatgagtagcgggaacaatcttagtcatattgcctttgtgtaaccacagtttacgtacctttcttcctccatatctgtaacaaggtgtgtcctcagttacttttacagtaataacctttgaatttttgagtggcttataagtcacttttttatgttttttagtagctaaaactgtgtttgaagttgtgtttgttgccaaagtgccagtaaaagaactaagagtagcacaaagagctaaagctgtaattaattttttattcattgttcaatctccttaaatcattcctaaaattgaaataataaacataaaaacaataccaattgttaatccgatatcaccacctatcagttgacctactaatgcacccaagaaaataagagcgatagcacaaccacagcccattttttcatcagagtcattacttttggatttattttttgatttgcctaaatctcgactatctatcgtggttctactataaattgcattatgcatgcttcttttaggatcctttatgactccagcgccttttttaccatatcctggtataattttcttttttaattgtcttttatatttcgctgttgttcttgccttgatcgattttgttagagatcgatgtcgtattaatctactcatttttactctaaaccatatttcaataattcttcttgaactaggtaataattatcagtgccaatatattttgcaagattcagccagttagcacttgccacatcattacctaggtcaacgtatttctttatctgttcatggactacaaaggcttttgcaccactctcacatatcaaacgagttgtggcattgtctttgtagtctttttgcgtatcatcatcagcttcagcatgacccagctcatgcaagatgactttttcagtttcttcatctgataggccatctttaacaaagacaaagtcaggacaaggatcaggcatgtggactatatagccttcactctctatgtccttatacacaagcttcaaatgatgctcattaagtaaatcttttatacgatcactcataacgattcaccttactctttgccttgaaaatatccttttaagtaagacttgataattttacggtcatgatcggtcataggcttaccgtcgtaggagtgggcgttgtccaaaagagcatctaagtctgtatcagagatatttgaatcagagtgcgaagagacaccagctaagtaatcaaaactaacatctagcttagtcgctagtttctttaatgtatcaatcgatggctcattccttccaagttcccaccctgagacagtagtagacttaacatttattaattcagctaagtctttttgagtgtaatgtttattaattcgtgcattttttatgcgttcagctaagttcataaaagcctccttacacactttaactaggtttctatacactgagtatagttcttttacacaaaaaaactataaaattagttaaaaagtattgcaaatatacaaaacgtgtactatacttagcgtgtacttgagataaggcaggtgatataagtgaaatttaccgtcaagcaagcccgcgagtatgctggcttaactcagcaagaaaccgctaagcaattaggcgtagcacttgcaacttaccaaggatatgagtggggcgacgtggaaatgcgaattggaatggctaagaaatttgctaaactagtttctattccattagctcaactaattttttactcaaaaactagttgaatcgtgtagtgaaaggagaaaaagatgaatgatttagaattctttgactttgaaaaccagccagtcagaattttaaaaattgaaaatgaaccatggtttgttggcaaagatctaactaatattttgggctacacccatggtgcaagagacattaattctcatgtggcagatgaagacaagctgaagtcccaaattaggactgcaggtcagatgagagaacaaattttagtcaatgaatcaggcttatatagtttgatcttgtctagcaagatgccaaacgctaaaaagttcaagcattgggtcacacatgaagttcttccaactatccgcaaacatggggcttatatgacagatgaaaagattgaagaggtcttaaccgaccccgacacaatcattaagcttgccactcagttgaaagatgagaggcaacagagattaattgaacaacaactaagaaaagatgctgaaaatcaagttcatgaaatgaaacctaaagctttgttcgccgattcagtggcaactagtaaatcaaccattttgattggtgaactggctaagatcttgcgaggcaacggcgtagacattggagcaactcgacttttcaagtggatgcgtgcaaatggctacctgatcagtcgtaaaggcagtgattggaacatgccaacacagagggctatgaacttaggactgttcaagatcaaagaaacaaccatcaatcactcaaatgactctacttcaatcagtaagacgccaaaagtgactggaaaaggtcagcaatacttcgttaacaaattcttaaaaaaacaagctccaaagattgtagctgataagagcggaattaaggctgagtaccaaaacggcaatatcattggcgcaattaattcagatgggtctggatatatcgcataaatggaggtgatagctatggatgacctacagcacggtatttatcgcatggtagcaagggaagtggcaagaactcaaccaaaaagagaaaagaatttccttagcaaaaaggacgctgaaaaactgattaagaagtatacaaggcaatacacacttcaagagttcttgaatgcaactgaagccgcatatgtttgcggtatgagtcagacaaccttttggagattcagacaagaacataacgttcctgtccatgtgattgacggaataaaaagatacaagcgttctgagctgatcgcttgtgtagagaagtatagcgtacgtgggtacgcataggagggcattatgccagatttgggcactactaagcttgatcatgtattgagttatatctgtaagggatttgaaaaaatgttggagttttgcgccattgcattcttaccagcagctgtcatagagcagttgtgtatctatggtgtaacccacccagatcaagtgatctcactgttagttgtgcttatgctgattctttcagcatttgcagtcaaagaagttagaaagatgaaggagaaaaagtgaagctatggcacaagtttatcaaccacatatgggctatcaacgagccggtaagtttagcgaacgccagcttatccttgttgctcactctaatgctattggcgctcttagtggtgctagttttgcggaactgtcagtaaacgttaaagaatttttaggcattaaaaaagccctatgctaggcaaagcactgggcacatttacaaaaaataatacataaggagtatatcacaaaatggacacctatagattaaatgatttaaaagcaaccgttggcatgtttggtgatttcacccactttaaagatgtaatcgactttatttttgaaacaaatcctttcaaaaaggcattagatatttttgactgtgatgacgttggtgacctctcagaagcaatcacaaacgacaaaggtgaatttgatgaggatttagccaaagacctttgtattgactgtttagacggcgaaaacgtggatgatgaagaccccgaagccgaatggggcgatcaaatgtatgacagagcagttggaaagtaggtgctgatcatgcatgatgcacaacgatggctagacggaattatcgaggatatccctaatatccgcaaagaaatgctggacgactgtcgcactatgaagacctatggcaaggcaaaacaatacgctaggcagttccaaattgactttgagggtaattataaggctacggcagaagaacaagcacagagcttatttaacagccttatcgaggacgtagtaacagaacttaatcgagaatccgacagaggagagattaaacatgactgaggcaacaaagctagcagaaatgacaaaagatcagctaattaagatagttgaccagttgcagaatgaaaagaaagaacaagccaaaaaagacaacgctagcgtttatgagcgcttgtcaaaagtagatgtttctaagtttgttgataaaaagaatggtcttaattatctaagctgggcgaaagcctggggtctggtaaagagtattttccccgatgctagttataagctgcgggaatacccatattacacacaaacagcagacggtaattatcagcagattggtacacacgattacttacgtactgagtacggcgttgaagttgaagccagcgtaactattaaaggtgagacatatagttcaaagctttatgtcatggactttcacaatagggcacttgaccctaaaaaagttacttactttgaaattaataaaacgcaaatgcgggcattaaccaaagcgttagcattcgcaggactaggtttgaacatttacgctggtgaagatttaccaagcaacgacgaaaaaacgccacagcgtaaagaaagagtgaccgagcaagagttaattgaaaaagctagaaagagtagaacccagtatggtggcgataatgagttagttaccgatattgtggggctcgaaattgatggagataaacaagcaaacgcttttttgaaccaatggtgtaaaaaagataagaaaaacaagaatttatataaattcattatgaagaatcaattagctacacatggcatgaaggtaggagcataaaaatgggtgaagagcaacaagtgtttgaagggtcaaaagccttcttaatgattccaccagctattgaacgggataaggatttactaaaaaagcccaaaacaattcttttaatgggtgaaattatttcgatgctgaatgttaccggtcagttctttatgagcaacaagaaaatagctgaaagacttgatgttgatcctcgtactgttaatagatatcttgaccttttagaaaagaaaaaattaatcaaaagggaaaatatcaaaagcaacgaaaatggtgcaattataggtcgaacaatacgcgctggcaacgacctcatgacatacatgtcaatagggtggcgacatgatagtcatgggggtactgacacagatgtcacaatccccatgacaccacggtcaactaaatataacagtaataatagaacatctaatagaacagtagaagatacatatagttctgctggcgcagaacaacctatcccctacaaagaaattattgattatcttaactctaagactagaaaacatctggattatagaactaagtcttatcagcgattaattcgtggtagatggaatgacaatgtcagaaaagacaaaactcctgaacagaagctagctgactttaaaaaagttattgataataaggcatttgattggcagggtgatgcaaagatgtggaattacatgaagcctagcaccttatttgctccatcacatttcgatgagtatttgaaccaaaatgatactcgttatgtaccacctgcaaatggaggatatggcggtgaagcagatttgccaccattgccagatgatgatgatttaccgttttagggtggcgagattatgcaaagcttagaaggtattgcaattaaaaccgaaaaatctgacaaaatgtgtcttaaacataacatccctatggcgttagataggcaaggaaaaccattttgtacagaatgtatcaaagaacaaattaaggcagaaaaagaaaagcaagttgcaaagtttaatcatgacaaaattgttagtattttgcgccgtaaaagcttagttgatgatgtaaatgactttgataagttatttagtaatttcgaggcagataagggctcaaaagaggcacaaatgggcaatcttgcttataaagtggcacatgaattaatcgataatccacagaagccaattacagctttattttatgggaccccaggtgaaggaaaaagccatcttgccatgtcggtcttgaatgaagttaatcaaaaaagcaagccaccacagaaatgcttgtttgtagatattaataacttgtttgatgcgatttatcactcaaaagatgatccaacaagttggtggacagaatataatgcgattcagtttttaggtgatgtagatgttttagttattgatgattttggtagtgaatcatcaatgcgcagggatgcaacagaagccacagaattcaagcagaaagttttaaagaaaattcttgataaacagagacgtttaatcgtgacaactaatttgacgctgtcacagttgcaacaaacatatagccctaaaattgttagtcgtttgttatcggattcacgtggtagacgcttagattttacaggaatttcagataaaagattggagctataacacatgattaaagtagtacagccaccatgtgactactgcaacttcaagagcagaaatagagccacatatgtgcttagagaaaagaatggcaggtttggtggcttcttgtcgctaaataatgatggatcctttgacatcaatcgagggatgtataagacagaaaagaaaccgaatttttgcccgaattgcggtagagatttaaggaaagacgctacacaagataaagataagtaattgagaggatagacaaaatgcgtaagtttgtagctattgaagttggaccaaggtccagcgttgaggtagatgttgaaggtcgttggctggtacggtggggtgttcctatcacgattaggggatttaaattcttttttgtaccaatggcaaacccaaaaaacgtgagaattgaagcttattcgcttgatagtttgaaaacttttgataggtttcacatttcacatgaagtagcttggaaaggttgctcaacggaagaaggctttattcggacggtcatgccgtttataactcgaattgataagcgtttggataatttagatgacgatggctggaaaacggtattcagggatgaatacatttcagcaattgcacagtgtggtgcaagaaactcaaaagaagctaagttactagatgattttaagaaacggaaatagcaatgaatgactaggcaagaatttattgacatgctaagcctctataaaggcgttgaggttcaatttagcgaatcaaataagtatgtttccatcacacttacgaaatacacagattgttggggcggcgcttcaccagaagttggcttttattggggtgaacaaggtgtttctgttagctatacagatggattagaaccggaagcacttcttcaattgtcatacgttttgaagctagtgtatgagtacttgcagaaaggaacatggaaatgagcaaaaagaaagtcaaagaaaaacttaaactttattatttttctcaatgggatgatccgtacgacgtgtataacgaatttacggttttagccaaatcggaagatgatgcgtggaaacaaattaaagaaaagatgaaagaaccagaaggctacggaacggattataacggcaacacgtatccgtgttatggaacgtatgagcataatcgctctgtttacaaagttaagtgctatccggtagataagcctgttgtaattagacatttttcagcagattagcaaaggagtgcaaatgattgatgtaatcaaagtcctgctggtcatgttcatcgtcaccgcgatggtgtggctggcggcgtatacggtattgactgcggtaaatgctttaaaagattggatgtatttagctaaaggaatgattttaagtttgtctaaagagatgaaaggaacatggaaatgaaaatcgatttaccagtaggaaccagagcaaccttagaagaatttatcgatgcttatacaccgtattttttaatgaagtatggctatagggaatacagccatgttttacctttaggcacaagaaaaatctgttgtcgatctgtgaagactaagtatggtgagattattgtccatgatgacgacgtcttaacctacgtaggcggcaaaaaatgggctgtagagcaaagaaaggagcatagagatggaattacacaaaggtgataaatacaaggacgttgacggcactgaatttcaggtgttcggtgctttggatgacacgtatacatattttttcattgctaacttaaagcaaaatatcgtaattagaatgcaacctaaaaatgcaactgagtttctatcaggcatggagaaggtgaattgatggacggatactcaatgatgctacttttaggtgtgttctgttggattgtttcaagcagcggtgaaagcagaaactccacagttaatacaatcatttttggagtatcagttgtagcattggtgtttttaaggctatttaaagtgttatagaggggatttgggcgaatggctgagcgtaaggatgttaacaaatttttaaagaaagatttctgggggtacatgtatcaaggcggcattcatccagggcaattaacagggactagttttgatttagcaccagcagggcatagtaataccaactcgaccgaaaaagcttatgtggacactatgagtaaagcagagcgagcacagtacttagccttgactgtcttagtagcgattaaagactgcactgactttgagtatcatggcaaacatagaaccatcttggaaaattactatatccaaaatcttaataattaccaaactcaggtaaaagttggcatgaatgacagtgaatataaaactgcaaagaaaaatgcattgaaagagttcatcagtcgttatgattactggcgtgacgctcgtgattgtcctgaattgccgccccttttctaccctcaaaaacccaaaaatcgcccaaaatctatccaaaagtaaaccatttttcacccaaaaatcgcctaaaaagcgaccgcaattcaaccatgaagggaagtatattggtattgtcgaaaaattaggaagcacgagatctgattttttgacacggcgtgaataccaagtaagttaagttcattaatttaacctcctttaaaattatggtaagaatcgtgaaagcctgaacaggcaaaaagacacgtccgacttaaagttgcggtggtgttggtgtaagtccaaccacgattcataggctatcaagttgggagccaattaacaattcttatattcctttattattgttgttttgtctgatagtgaagcggcgtggaaaaccgtagatctacgctttatacagaggtatagcagttcgactctgctgtgtctcttagcttgcgaagacccaaggaaaacggcgagcaagcgcaaacactgtccgtcacctgtaccatcaacgtcaggtgacaccatgagtcagacaggtgtgtatgcaagttgtggtcttattgcatgccgaggttcaattcctcgttgattctttgatcctttcaggatcacgtgttaagtcagcatttatatgctgatctgatcagtcttgtaccggtcatttgtttttcgaaaatgttgcatgtagattacagtatatctggtgtgcagtggtatacacgtgagttcaaatctcacactgatcattaggaggaaaaattaatgaaagctttatccgtacgtggtgactatattatgcagatgatagaaggtaccaagaagattgaatacaggacatgacagacaaaatatcgtggaccattgctaatgtgttcaaccgctaaaaaagtggctggcgcagtacctggatatgcaatttgcatagtcaatctaaaagacattgaatggagtgatttcgatgaatgttttcattggagcattgaattacaagatttaattgagcctgtgcccgttaaaggacagctcaagctatttaatgttgatgatagtatgattacacctgttaaagacaaaaaggcttggaaagcaaaaatagagcctttaatttacaagccacgaaaacgaaaaaataagcgctaaaaggcgcttttttattttggtgaaaattatgtataaaacaaaaagattcggattggttagctctaagacagaaaatcaaattttagcagagctggagcgagatctaaaaagagaaaggaacaacaaacatgagtctactagacgtaatcaagacacaaagcctgatcacagatagtgtgcttgtttccttttctatgggtaaagattcgattgttacgttagatctatgtatgaagtactttaagcacgttcaaccgttctttatgtacttagtacctggattgcagtttcaagatgaagcactagaaaagtatgaaaagcgctacggtgttgaaattattgaagtacctcactttgaaaatgctgacttttatagatacggctcttttagagatgctgactatagtgtcccaagagtgaaaattagagcaatctatgaagctttgaggcaggacacgggcatttactggattgccggcggcgaaaagattaatgattcaattgtgcggcgcgcaatgctaaagagcacaggttcaattgatgaaaagcgtggtcgtttctaccctgtcatgtactggactgataaagagattaagcagtatatgaggatgaaccacctgttctatccaaaattcaaccaggaactaggattcagctttcatagtttagctggtaaagagctatcagcaattaaaaagatttatccggacgactatcagagaatattgaaatttttccctgaagctgaagccggtgttttacagtatgagacttataagagaggtgaaaagtgatggttaggaaattgttcccagatttacattcttgggcggctgatggtgctgctagcttgcatcgttatcctgaaggtacaaaagctccgagatctttagctggagacagagccgagcgcagatggtcaagacaagttgaacaacagatgaaatacttggatgatccaaaatatatcaaagcgcaagagcgctaccaaaagcaaaataaagcggatgacaatgcgatggctaagatgcggacagcagtagcaaaggaatatcacaaaaagcatcctgaattgtccaggattagagctagattgcggtcgattcaaacaggtacaggggctaaaattatgagtctatacaatcagggatggagcggcactgaaattgctaaaaagcttcgatttaatgcaaaaaaaggcacttttggacgttcgggggggtagaaatctcttgtgacaaaaggcaatttcaaaagatgatcaacaggaagcagaggaggttaatgatggttcgcaaaagagtaatgtctgaacaagaataccttaatcgcaaaggcgttggaagttaattaagtggagttatggatgaccgcttgcgttctgtcagacaacttagatccacacgaggagaagaaaaattcaatcgtgacaacaaaagtgctatagatagttaccatgccaaacgaaaccaagctagacgcgaatatcaaagactagtatctagcgggaaagttcgaccacctagtaatgctgaaaaagcatggaagactgcacatggattatctgaaaacagagctgtacaagcagcaagacgtgtactggctaaacatggcgtagattggaaaactggcaaaagaatagggacagtttctggtagaggactatggcctacttttcgtaaaggttcaacaggcagcagagggggctagttatgtctaaaccattacaacattttaaatttggaacagtaaaaagatcacaaatcaagttcgctgactataatcctcgtatcattgatgaaagcaaccagaagaagctcattaaagcaatcagagagaatggattaatcgagccgctagtatggaataagcgtacaggtgtgttagtgggcagacatcaacgtttaaccgcagctgataagatttaccgtaaaaaagattatgaagtacctgtagcaattattgacgttgatgagaagactgaaaagaagctaaatgtacaactcaataacccatcgatacaaggcgattgggacttagatgagttagctgatctatctaaggatgtttcgtttgatgatatgggctttgacaaatctgatattgatttcatgtttgatggtgaggttgattttgatggaaaaattaaagatgaaccaccagagagcaagaaagaaacgccttatgatgatgaagtcgaagacgaaaaagacaaattagctagtcttgctgaattcaataagaagaaagccgactttagacataaagacaaggacacaaccattatcaatttttataccaaggttgttttcccatctaatgaagctaaagaagagttctataaaaaggctaatattccagccaacgaagaatttatcacgttcgatcagttaaaacggtattttgaaaagaaataggtgagttaaatggctaaagcaaaatgggaacagtggctaaagcctgaaaatctcactttacttcaaggctgggctagagacgggcttacaaacgatcaaatagccaagaaaatgggcatagtgcgttctacgcttcaatcatggataaagacacatgaggacatttcaaacgccctaaaaaagggtaaagaggtcgttgatgctgaaattgaaaacagtttgatttcaacgatgaagaaacacactgttaccacgacaacttataagatggtcaaaaaggatgaatttaatctaaaagcagagcggattaaatttagtaatgtgtacaaactggaccaccctgaagcttcaaaacaagaaatcttgattgctacagctgcgaacgtagatgtctatgaaaagataccgattagcaaaacggtgactgaagtagacccgaatgtatcagctgctattttttggcttaaaaaccgtagacccgacaaatttagagaccaaacgttccagaagcttaatgaagccaacgcacgcaaggctattgctgatgctggtattagtgaagcgcaacttaagtcacttaaggaagaagacaatccaagcaatcgcacggttattgttgatgatgtagcaaagatgaaggagttgagagatcacgaaggcagtacagataagcaaggagattaatccacacttttatgatatgtggactactgataaaccttatgttgtttgcaaaggcggacgtggctcttttaagtccagcgttatcagcctgaagcttgtaacgatgatgatgttttacatcgcaatgggcaaaaccgtcaatgttatttgcattcgtgaaaatcagcagtacttacgtgactctgtatataatcaaatcctttgggctatgagcattttaggcgttgaatctgaattcagaacgcgtgttagccctatggtgattcaacatatacgcacaggatcaacgttttacttctacggtgccaatgaccctatgaaattgaaatccaatatcgtaggcaatgtggtggctgtatggtttgaagaatttagcaatttaaagaatgtgaatgtttttgatcagtctgtgcccacctttattcgacaaaagcctgatttcgttaaagatgtaaaaatattcattagttacaatccgccaagaaacccatatgcatgggtgaatgagtgggtaacacagcgagagactgatccagattactttgttgacagttccacgtatttagatgatgaacttggctttactactaagcagcagttagatctaattgaaaaatacaagcaaaatgaccccgattactaccgctggctctaccttggtgaggctgtcggattaggtacacaagtctataacatgaagctattcaaggttgtggaccgtattccagatgatgaatacattactgacatcttttacggaatggataccggttttatggtgtctgctacagcttgtgtagcgtgtgctttcacgaataagtacaacgtctatgttttagacacgttttactacgatccaacaaagtacgagcgtaaattatcagcatccgagcaagcggaacgagtacacgactttatcaatcagattactgataaatatggcgttttgccttgtaatcagacaatagatagtgctgatggcggtatttatacgcaatactggcagatgtacaacgtccaatggtctaaggtgcgtaaacttggtgaagccgagatgattgaccgtgttcaagatttagccgcacaagggcgcttgcatgttttgaaaacaccaggcaatgacatctttttagacgaacacaagaaataccagtgggatccagcaaccgttaatagcgatcatccgcgtgttatcaaagagtttgaccacagttgcgatgcacttaaatatggcgtgctagataatgagcagctacttggcttgtctgcataggtggtgagtacatgaacatatgggcaaggattaagagattttttcgtaaaggaggtgcaaagctaggcatggtagagtataaatcgctgagagctatcacagatgatccacgaattaaggctccagccgaagagtatgagcgcattcgcaaggcaaagaactattatcaagataacttgtcgcaagttaagtactatgcaatgggtaacgaacataaacgcaaacttaactcaatcaatgtcacaaaaatggcatcaaggcggcttgcatctctcatatttaacgagcaatgttctatcaaagttgatgatagtcaattgcaagacatattagacaccattctcaagcgtgaaaatttctataccacgtttgaaactgagctagaaaagtggattgcattaggctctggcggtatccgtccttatgttgaagatgacaaagtaaaacttagttatgctgacgctgacgatgtttacccgcttaattcaaacacaaccaaggtggatgaaattgcattgtccaggcgtattcgcaagattgaaaacaacgaagctgtttactataccttgttagagttccatcagtggggcagtagcaaagaagtagacgatcaaggaaatgtttaccgaccttacacgattactaatgagttgtatagatcaggtgactcaaacagcatcggtgagcttgtaccacttaattcaattgatgaatatgctgacttgcaaccacagtcaacatttcagcatttagaaaagccgctttttgccttttaccgtaatgcaggagcaaacaacaagagcctagctagtccattaggtttaggcttgtgtgataactattggcacacggtagacgacattaacgctacacacgatggctttgcatgggacgtgaagactgggtacaggcggatcaccattccgaaaacgtgggtaagacgtcaaacacagatcaacggcaaatcgattcctgaaggctcacagatgtattgggatcctaaagatgcggtattcgtaccaattaacgcctgtaatgatgactctagttcattcaaggatttagcaattcaaattagaacggaacaatacacggcttcaatggacttctttttacatgaatttgaaaatgaagttggattaagtcaaggcacgtttaccacctcaccaactggcgttcaaaccgctacagaagtagtaaccaataactcaatgacttaccaaacgcggtcatcttatttaacgcaagttgaaaagatgattgaccagctggtatatgcgattgctgaactacttcaaacgcctgatgtatggagtgatagacaagctcggtggtctggtgacattgataagctgacaattacgcctgattttaacgatggtgtatttgttgaccaagaagcccagcgccaaagtgatttacaggctgttcaggctggtattttgcctaaaaagcaattcttaatgagaaactacaatcttgatgagaatacggctgaccagtggttaagtgaaattcaagatgagcaatcaccagagccgccagagcaagaaatgtcaatgtttcctagtgagggtggtgtagcaagtgacagatcaagagataacgcaagcccagatgatggagaaagcaagtaatattgctgattattatgcttacacagaacaacagatgttctatatcttgattgactcatttaaaaagacacgtccagagttgatgaatgctgaaaaagacccacaaaaaataatggaatggcgattaaaggccctatctgaattgggcggattaactgataaggtgattaatttaatcagtcgttctagcggctattctaagcgtgctatttatgacttgattgaaaaagatgggctaaaggttactaagcagttcaatcgtaaacttgctaaaacgctaaaaaagcccgtacacgatgtttctttacagtctagggcaattatcaatagttacgtcaatcaaacgatgagaggcgttgacaattacgtcaatcaaaccttattaactcgtaactatagcaagaatgcggctgctaagacataccaagaaatagtaaataagactgttaacgatgtgattgtaggcaaaaagaccccacaaagggcactaatggacaatatttaccagtggcgcgataaaggtatgagttcagcgttaattgacaaagcaggtcatgaatggagccttgagggctacacacgtacagtgattcagtcaaccacttcacgtgtttacaatgatttgcgtattaattcaatgcaagagttcgattccgtgctttgtgttatgagttcacaccccgcagctcgtccagcatgcgcaccaattcaaggtaaagtggtgtgcattgtaccgactagtgaccctagatataaaaaaggctatccgagcatttatgactatgggtatggtacaccagcaggaacgcagggcgttaattgtggtcatgctctttgggcttatgttgaaggcgtatcgcacaattatcaaaaacaatatgatcctaaagaagctgtagcaaagatgaaagtacagcagaaacaacgctattacgagcgtggagtacgtaaaaataagcgcaaattagaactagccaagcgtgctggggatgctgacggaataagtaagtattcggctggtgttcgaggttatcaggctaaattaagaaaaattgttaaggatcacgatttcttagcaagacaatattcaagggagcaaatagcaaaggagaaataatatggatcagttaacacgcgaaatcaatgacttacagaacgaaaaggacggtctaataggtaaaattgttaacttagactcttacttaatggaacacacgctatttattggtcatgaaaaagagtatttaagaacacaaagatcaatcatgatgagttatgttcaaatgcttgatttacgaattaatgaactaaagcaatatcaaaagaagcacaattaatttaaataatcgacccgagtaagtcttaaaactgcttattttttatgctcttatcgtggtcgtaccacgtataaattaaacgttaggagaaaaatatggaacgtgaatttttagaaaaacaaggcttgaatgctgatcaagtaaaggctgtcatggctcaatatggtaaagacgttagtgaattaaaaagtaaggcttctaaagctgataactttgaaactcaaattggcgatcttaaagaccaactgaaagaccgtgacaagcaattgactgacctgggcaagcaagccggcgacaatgacgctttaaaagcccaaattgctgaattgaaggacgctaacaagcaaactcagaaggattatgaagctaaattagcaaaacagaaccgtgattttgctgtttctactgcactcggtaaagctggtgcaattgaaaataaggcggtcttaccatttattgacatggacaaggtctctgttgacaacaacggcaacctgctaggctttgaagaccaattggaagccgctaaaaaggatcattcattcctgttcaagcaggaagaaaagaaaacagaatcaaagcccacgccgcatattgtgtctagtggcaacaatgattcagatgttgaaaagaagccatctgaaatgagtcttgacgaacaaaccgcgttgtatcgtaaagaccctgacagatgggcacaattatttaatagataggagttttaaatggctgaaacacatttaaaagatatgattattcccactgtctttggcaactgggtgcaaaatctttcagaaaagaccaataattttatcaagtcgggtattatgaccgccgattcagatttaggtggacgtttaaatcaacctggtaccaagatcactattccatatatcaacgacttagacggtacgccaaacaattggaccgacgatactgacattcctgtagacaaccttacttcaggctcacaagttggtatgaaattctaccaaaacaaggctttcggtgaaactgatctttcacggcttatgaccggtgcgccaattcaacaacaaatcgcttcaagatttgctaatttctggaatactagtgatcaagttatgctgtttgcagtccttaaaggcatgttccaagtcgatgacattgctaattcaaaggtgctcgacttaacagtgcaatcaccaactgacgctaatttcagtgctaagggatttattgcagcactttcactcataggcgatcaaccagaaaatattttgagtgctattgcagttaactcaactacctatgcgatgatgaagtcacaaaatttgattgatcctattcagccttcaaacggtgctactccaatcaacgtctataatggcaagcaagtagttattgatgacgatattcctgtaaacgatgatggcacttctgtagcatatctgttcggtaacggtgccattagatactcaacttcaatgtatggcactcaagtagtagatgagccacttaagcaaggtggacgtgaatccgttgtacaaaagcgcgtcggctgtattcaccctgctggtatgtcaattgaaccatcatttgtaccaacaaaggcaaacttcccaacacctgaagactttgctaagaaagaagcttggacaatgcctaaggatgttgacgttaagaaggtccatttggttgagtacaagttcaagcttgacccattctttgtcttaaagcaaaagtctcaaaaggctgttgacaaggcaaagcaaaatgctgaacaagatactgacaaggatcaaggcaagtaattaggaggctagattatgacgccactgttagattatgagacatatgaaaagctaggcggcacggcaccagaggacaaatttgctaagttggagctagatgcggaagacctgattaatccaagaacgaatttttattacttgtctcattcaattgacactgacgcagataaggaaagggtttacctatttagaaaggccttgaccctgcaaattaattactcaaatgatgttggtgcgtctacgccttatgaaatgtctgataaggatattaaaagcgtatctgtggacggtacaaccgtcacgaaaggaaccactccaattaatttcgtaactgatggtgtctataatctggctactgattatttatttagagctggcttgctctatcgaggtgtgccttatgattagaccacctaaagcgatgttccaagatactatcaccctgaagcatttagaagccgataagagcgacccctacggtgaaagtgaaacagttactcaaactgagattaaaaacgtgagattcagccttagaacagtgtattcgggtactaacaatgataggcaagttgtagcaaacgccacaattgtggtcatgtctacgtactcggagccgttctatgaattcacggagcaaaatcagggcgacaaaattgtttttaatggtcatgaatacacgattaagacaattaaccgtgacatcgagccttttactaatcaggtctatcaatatagattgtgggtgatctgatgggtgttaaagttcatgtaaacctatcaggcttaaaccgtaaattaagcgctgagagcctaaaaagagcacgtaagttaatggctaatgatgcacttcaagcaatgaataaatatgtgcctagttcatcacagggcaacgatgaaagcggctcaactcttagaggaatgtcaagcgttgctgaagatggctcaagtgttatgtaccgcgcaatttatgcaagggcgcaattttacggttttattaccaataagtacggtggtccctttagaattcacaattacactacgcctggcacgtctagacggtgggatttacggctaaaaggccataaagaagacatgaatcatgtcaaagaagcttttgtgaaaggattggacctgaagtaatgctagtaaatgatttacaagaagcgttggttaataacatcaatcgccgaattgactcgggcttttttacctacaataaggatcatgtgctgatcaagtatcttgataaagatgatgtagttggtctagtgcctaatccaggtagccacatggtcagtatggacatggctggtgaagagtactggcaatacaattactcaattactatgcggactaaatcaagagctgaagcacataatcggttatttgagttaagtcagtatctgcaattgctgaatcaaacaaaagatttaattagtaaaaatggctcgtgggtatttgatcagattgaggtacctaacgaaccagcagaaattcaagaagatttacaaggaacagttacatattcgatggacgtggctgtttttatttacaaacaaagaggagttttttaaatggcagaagcacaaactaaattcatgcctggtactaaggcagacaatacaggttttccagaaaactttgtcaatcgtatttttatcgatactaagccaaacgtagataatgcaggcgatgttgacttagacgatgtaactaatggctcatgggcttgggtagcctcaggtatcactagtcaaacaccaagtgccaacgaaacaaccactaatgacgcatattacgatggtggcggctttactgataccgacgttaccggtaaacaaattcaaattgctatttcaggtaatcgcaaagttggtgatccagcacaagactttgtagaaaagttgttctttaagtttggcacatctgttaagacccgtgttatttggattaagaacaatttaccaattattgcgcgttgtactatttcaaacattgttcctactggtggtaacgccaatgcaaaacaaactttcagtttcaacattgcctttaacggtcggccaaagatctttaatggtcaattaaccatgactgcaaccagtgtagcaaagatctatagcgcttctgttgattcttcaaagaaggcggctaatgatgatgaccttgttccagctgtaattaaagaagaagcagacgcaacagcgtcatctggttctgacacaggatcagcaggaactggtaaggacaagtaaacaaagttaggagaattaatagatgagtgtaattgaattagatggtttaaagaattttaacaacgtacgtgaaattaagctcccaggtattgaaaagacttggaagatcaagttcgatgacaattatcgtgtacaatccagtttaattgctagtcaagtggacaagctttatcaagaacaatcatctgatgattatgaggaagaattgcttgacatggcaccagcagaacgtcgcaagcgccttaccagtgatttagctaagtttaaaaaggcttgcgtagatggcttgagtgccttacttcaagacgataatgcaggtgaagaaatctataaggctatgggcgaatcaactgaaatttgtgcccaaattattggcaagatcaacgacactgctgataaggtgctcaacgtcgctaaggacgaagagaagaccgcaaagtacgacacggaaagatagtgaacttatgctaagtcttactcatagcccaacaacacagttttcgtggaatggggaaatttatgatattgacctagcgtttgacactgtcttactgtatctgcaattgcaggaagaccaagaattaaacccattccaaaaatggcggcaatcttgtaaattgttttttggcaaaaatcaaagattgccaagtgatccggatttttacgcgaaatcatttgagaaaatctcaagaattatcactgatcagccatatggactaaaggaaccagaaaaagatgatggaggtatagaagcaaccaaacagtttgactatgtcagggatgcgggcgctatctatgcctctttttttgaacaatacggaattgacctcaacaaagaacgaggaaaaatgcattggaccgtcttcaaagccttatttgatgggctaggtcctaaaacatactttcaacgtattttggagattaggcgtgaagacgccagcaagattgaggatcctacagataggcaagaactgcttgatgctcaaaactactatgcggttgatggctctaagactgaaaaggaattagagcaacaagctttgaacagtagtagcttgtccaacatgttcgattcgttactagatcaagcaaagaaaggaggtaactgatggctgacggtacaattaagattgacattgatattcctgttgaaaaggttcgatctgatactaaagaagtcgaccatatggttgaaaatatcggtaagaatgctggtaaagacatggacggctcttttaagaagaatgccgaaaacgttaagcgtgaagctaagtctgcaggggatgcgatagataaagatttaggcaaggaacataaagctaagatcaaggttgacgactctgaagctaaatctaaggttagtgaggctaagcatgatttagacgagctacctaaagaacgcaaaactaagattgacgctgataattctgatgctgaccgtaaaataaatgagacaaagcgcaagactaacgaattgccaaaaaagcataatactgacattgacgccaccgatcacacaggtggcgtttttgctaggattaagtctcactttgacaaggtcaatgaagaaggcaagaaaacacatagtctttttggaactatcttttcagcgaatattgtttctaatgcggctatgggagcttttggacgcgttaaagacgcattaggtggaatgataggcgaagctaagcaatacgccctagaacagcaaacaatgaatgccacgtggctgactttgactaatagtgcttccaaaggcaaagctatggtaaatcaaattaatactatggctgcagctgctcaaaatagtacccacatggtcgaccagttatctcaaaaattctatgcaattaacaatagtgcagagcaaacgggtaagttgactaaggcagttctgacattacaggatgcttttggccaaagtgatgcggcagtcgaaaactttggtactcagtttgctcaaatgatggctaacggtaaagtatcagcacaagacatgatgtctatcgttaatacttttccaaagctaaagcctatgttgctggattatgaacggcaaattcaccacagcaaaaacatgacgatgtccgaaatgtccgacttgatgtcaaaaggaaaaatcaagtcgcaagatatgatcaatgttgtgctaagagctggcaagaaatttcaagccgcaactggaaactttaccaaaaccattcctggtatgaagcgtacagttgaggctgaaatgcctagacttttacaagccttcgaaggtccattaactaaaatgcagagtcctatctatggtgctgtatctaagtgggtaagtagcaaaaaaacagagaaagaatttggtgcgcttggtaagactgtatctcacggaatgaatcaagtgatgaaggctttttctggtggcaaaggcgtaaatgcaactaaggccctggacaatgctattaacggtattaataagggacttaaaggcgtgtttggctggattagtggtcatgctaaagacctcaaaacaattgtttcaagtgttgcaagtattggtggtcagctagctaaagcggtttggaaggactttgcctcaattattaccactatcggcaatatgtttggcatcaccgccaaaaatggaaaagcctctggtggtgctgttcatgtccttgcagaagccttaaattggttagctaaacaaaaatgggctataaaaaccattgctgcttctctggtaaccatagcaaccattaagcaactggatcatgttgctggcagcttattttcaattggcaagaaaggctatcatgcttacaaagatgtaaaagccttaagagctgggctaaaaggggttcaagatatcaagaacttcagcaagaccgaacaaggttttgtaagaattggtagcgcagctcgtagtgctgctaaatgggctcgtggcttattcagtgcttcaaaaggtggcgctggtccacttaacggccttctgcagtccgctcactctgctggtggcttcaagaacttaactacagcgggcaaaattggcactggcttagctggtgctggtgttgctattgatgctggctcacagttcttaaatgcttacaaagatcgccataatgctgacaagcgtagtcaagatatcggtaaaggtattggtgctggtatcggcggtggaatcggattgtatttcggtggcccactaggtgcagcgcttggagccaaaattggtggctttattggtaaatggggtggcgaaggagttaaccaatttactaaagggtggcaatctcaaggtaaaaaagtaaaaccacaaaattgggtccagtggctaggacttcaagctcacaacagttttagtttctttgctggattaggcaaaaaagcaattaatggtattggcaaaggaattaatagctctaagcaatttatccaaaagaacggtaaagaactagctttaacgtttgctgatccgtgggctggaattcctgctttgattctgaaaaataatcctaaggcacgacaagccgtaagtaaattcgctaagggcatacaaaatggctttaagggcttgggtaaatggcttcataacctaccagctaacatgcacaaaggctggaaacagggtgttgaaaagtcacacaaagtgatgtctaagttctggaaagataccagcaaaggctggagaaatttctggaaaggcgttaataacaatcgttatgttaaggcttttaaaaaaggtgaattttttcaaactgctgtaaaggatatgaagtctcgctggaagtcattcagcaaagacttcagcaagaaatggaactcaacttggagaagtgctcaaaaacaaggcactaatttcaagaaaaagtttggtaaaacgtggaattctacttggaaaagcgcaaggtctaagtggaatagcttcaaaaagttatttagcaaagcttggtcaaataattggaaagccataaactccaatcgttatgttagagcttttaagaaaggtaaattcttcagtacagctctaaaggacatgcgttcacgttggaactcatttaagggctggctgggcaaaaattggaacaatttctggaagtctactaacaaatgggccaagtcttcatggaatgggacagtcaaaaactggaactccatgtggaactcaattaataaaggttggaatagcttcaaaggcaccatgaatagtgcttggaaaaacttctggggtggccttgcttcaatagtcaaaggctggggcaagactatcaaggatgactttactgggacaattaacaacgtcatcggtggcgtcaacgacgttattcatgccttaggcggcggtaaaaagactattgatttcttgcacttcgcttcaggtactgactggaaacacaagtatcctattcctgctatcttaaatgatggcactgacagcccgcaaacacacaatcgtgaatcaatcattcatgctaatggtgcgtgggagttattaccagacaagactaatctcaagcgctttttactacctggtgatgaagtggtaaatgctagagacacagctaaactgtttggcaacgctgttcactttgctagtggttcattaccttacggaatcagcctacctagcgttaattactctcaaattgaagaaaaggcactcaaacggcttcaacatatcaatgaggagcatttacagctagctaagaaagaagctcgcagaaagcaagctagagaccataagaaggacagtgagtccaaaaagagtaagaaaaagtcatcaaaacataaaagttttactgctgatgtgaaaaaacgcaaaggctctattttagttgacacaggcttactctatgattctaaaaaagatactggtaaaggcacctacataaacgaaaagctgttcaagcgtttcatgtcttacactaaggctaaaccgattaaagtaagcaaaaacagccgtattcgttaccatgatttaccaactaaacgacaaggtaaatattacctagtagattcaaaatggctcacaggggctaaaaacaatactggtaagcttgaaaaactgaatcgtgaaagttatctaaagcttttacaatttactaaagctgaacgtaagtacaagctccctaaaaagaagcgtaaagcttcttccagccgtcgtagaacgacaactagaagaagacagtcatcaggttattcgagtaggtcatactctacaaggagatactcaactagaagttattcaacgggtggttattcacgtgttggtgcttctgtttctgctagtgtaagtggattgaagagtgtccaggctttgtctaaggcattaaaaggactcaagggcactcacaaagtcaaagtaaaagcatcagcaagtggtagcaagtcgattactaagctgactaaaagtattaaaaaggtagctggcaagcataaggtcaaattgcaactcacaggtactaagacagtatctaagctaagcaagaatcttaaaatacttactagtcgtgtcaagtctagtcgatcagctctatcaaagattaggactagcgctaaacatgcttctagcggtcttaaatcattaggaagccgttctagttcaacagctaaacacattaaggcgctgtacaaaactactaagaagtctaaatttggttctgcaatcgctaagcaagctgaaaaggccgttaagtctctcgaaggcaagggcaattttgccaaagcctttaagaaattggctaacgagactaagaaaactcttagcaagatgaagtctgaaactgaaaagaccttcaaagctatgtggaatactttgaagaaggattcttcaaatagcgagggaaagattgacagtgatctaggcaaattcggcagtaagttcaagcatcaatggaccagcattcaaagcggcgtcaagtcagcatttagcagattctggtcttcgatgaaaaggactgctagagacgggttaaatgacgttcttggcgttctcaatcaggctattggcaagattgataccgtagttagtcaattcggcggttcaaagaacgctgttcacaaagtggcaagactagcaacgggtactggtgctttaggtggtgtaagacgtccaattacggcacctacactggctatccttaatgacggcaatgacagccctgaaactggtaataaagaagctatttgggacagaaacacaggtgatgttgaagtcgttcctggtagatttactcctagaatccttaaaccaggtcaagaagtattcaacgcaaccgaaacagctctattaggctatacacagcctcagcattttgctacaggtaccggtgcacttaaagaactgtatcatatcgctaaaaacaattgggaacaccctcaaaaaaccggacaagctctatttagctctataaatggtcttactggtgcaattaatcagttagcccaaggagctaaaaaaaagggcgaaaatcaaggcgttaaatggtggtcacaactgtggaaaatggttgatgacaaggtcaatgatggcgctggaaatgtatccggattgcttaaagaagctattaaggtatccaagggcaagccgtatgtttggggtgctaaaggacctgacgcttttgactgttcaggcttggttgaatatgctgctagaaaacttggcattaatttatccgctccttctggcactgaatatagtcaagttgaacatattcctcgttcagaagcgcgcatgaatgacttggttttctacggtgctggcggtggtgaacacgtaggtattgttagagataaaaatacttattggtcagctcactcaccgacatcacaccctaatattggctatgacagcatcgatgctgcacctgcacatccaattcttttcggccgtattcgtggctatcattctaagaacgataaatctggtgacgttaaggcgaatactaagttgcaaaagcagattaaagaccaagtaggttcaggattctggaaaaccatccagaagattgctgacaagtacggcgataatggtatggcagcagcatttaaattaggcggttcagttggagcaagagctaaagcacttgcaaaagcaattaaacaagccgttccaggtgctactcgtaatggacttgctgggattatcggctcatgggaatttgaatctggcggtttaaatccagccgcagtgaatcctaatggtggagctagtgggctagggcagtggttaggctcacgtttaactaatttaaaggcttacgctagacgacaccataaatcatggaccgatccagctacgcaaattaattttgcagttaacggtgatggctcagacagtgcaacttttaagagaattgctagaggccatggttcaccaggcgaattagccaacgaattttcacaagaatgggaacgtggtggctatgatgcgcaacacgtagccgcagctaagcaaatcgtcggctggttaaaaggctatgcacgtggtggaattgtatctaagcctgaacttgctatggtaggtgaaggcaatgcaccagaatcaataattccgtgggatcctagtcagagatctagggcttaccaaattatgcaaacaacgcttgataacttcaaagctcaagatggcaatgctcagaaataccaaaatcaagctcagcaggttgttgacttaactaagacaaacgctgaaattcaagccattaacgacaaatttgatgaggcactagcggctttaggtattcttacgtcacaagatgaagtgattcaagttaacagctatcttgataagactaagattactgaggctatttatcatgtcatgaagcggatgaatattagatctaatagaaattcgaggtacaacataagtgggcattaatgataatagtgagattatttttcacaaccgaagctcaactgacttcggtattaaagttttatttcctttcaatccattggcaccagcgcctaaaaagcaaatgatgtcaattccagggcgttcaggtgactgggctactaacgacagtacttataattcgtcagaaacgcctgtaaatgtggtcattcatttacctagaagatatgaggactgggagcagctgaaaaatgacatcgaaaattggctatatggtgatgaagactggctgagatttagcagaaattctgattacttatatagagctcagatagttactgctcctacatttacacccgttaattttgaaagaactaacgcgacattcacatttcacttccaaccatataaatatgatgtcgattccattcattggcaggattttcccagaaacggtactgtatacaatcgtgaaaatatcgatgtaaaacctgactggcatattaatggtaaaggcaattttatgctcaaggttaacgatgtaccgtatgagtttaataacattgatggtgacatttatttaaaaggcgacgagggaaatgcatataccaacgatcctactgccgcctatttaattgatggattattaaatgatcacataagactagcaaataacaccgcacctgttctgtacgctgagggcaatggtagcaattcaatttcaattgaacctatggacactaattcaactttaaataaggctgagtttattcctagatggaggcgattaatttaatggttgatacggcaacaactgaagacactggttatgctattggattagatgctgaacaatcgccttatcaagatgtcatgcaatgtccattactactagggaacgccgtagatgacgctagtactcaaggtgaagcagcattgtttgactatatcgaatgtaaagtcacttggaacgccaatcaaattcctacattacagttaacgtatccagaagatggtaaattcattaagttaattcaggttgaaaaggttatagttggtgatattaacagaattttgactcaccaaaaatttagaatcaatgaagtgcttagaagtgatcaaaatattgtagtgaatgcgacacacattatcggtgagtacttggtcaataatcctattaaaggttcagagccaattacaggggctaatgtgacggcttcatggtgcataggcgagattctagggcacctagctaagccagtcccagagcttaactatgatagcaatgtgaccaaggtggcaaatgctaatattgatatttctaatacaaatgctttaaatgcattgcttgatgctgaccagatgggtgataagccaggtaactcagtcctcgcacaatatggcggggacttttattttgacaacacaaccatttatcatcgtgaaaatgcgggcgaagatagaaatattactgttagatacggtgagaacatccaaacatattcccaagaaaagaccatcaacgatatgtatgttggaatctatgcattcgctacatacaatccaggtcctactcttgcaacgctgaacaacgttgactggaatggtgtagccgatctgactgactggaatagtgttgcgacggttacttacaacgctagaggcgctgtagatatttacaatgcacctgttaaaggcgctcaagtaattgggcagctgacaacaggtacacagattcagcttggtaagcccattagcgatggccaaaccgtttctagttcggtcaaagctggcgtacagcttcaggttaatactatgaacggtgatcaatggtatccattggcttcaggcggctggatagatggtagttttgtcaacttcgataagactggcgactatgttgttaataacgtagttggacatatccatactgcaattgattcggctggtgcattggttagatatcctgttcacggtactggcacggtttcatacactgagggttataaaaatattcatgtttattactcacctgaccaaggctcacagcactatagacgtaataagccaggtactaataagccttggctgattcataacggctctaaaattaagtatgattatgtgacaactgatgaaaatggtaagacttggtatagaatcggtaaaaatgcatgggtgtatggtgatcacttatccactgataaaaacggtgatgttcaatcctactcttcacggggctatggcttggttaagagcggcgcaaagaaatacgctcttaaaaagaaaacaggcacgatggaggtacaatatcatcacttaagtcttactgctgctagaaagcaacacaagaagaaatatatttacaaaggcaagggcaaaaagaaaaaagctatcaagaacccgaactatcaacgaggcaaggcaatcacccaaaagcacaagtactacaaccttaattatggtcaggtacgtgttggcggcgttctttattacaaattaagtaatggatcttatgtaaaagcttcagatattgacaagaaagcaagcaaaactactgttcctgaatcgcctagcaaaattatcagcgatattagcaaaaaccgcggaaagatcgaaatgtattccactccttcaaaagggagtgcggctaactggtcaattcctgctaacgttgagtttgatatttctaagagtgctcaaggtgcagatggcaagacatggtatcaggttacctataaaggcgttaccggttggattcctgctgagtatactagttcaagcggtaataatgatttagagccacaagctccagattcgagtgctaactcgtacgatgaaagctctgatgaaactatagcatcacctcaagatcaaacggtacgtgttgaattaaccgatgatttagataacgtggttaatggtgtaatttatccaacaggatttaataattcacctgaaaacgcacatattatgaagcttgatctatctaactgtattaaacatgatgaccaagacttatctgggttgcaagacgatggcacttataaagccactgctactgatattcagcaattgtatcaagcggctgttggttcactaaaggaatatcaaattggagttattcctattagtatgactgtcagctatgctgatttagatggtaacaaagccgacttactagctcttaatatgtacgatacggtaaatgttgattttgcccgctttgacaagattgaaaaaggtaaagtcagcggcaccgtttggcaaatgaaagggcaggactcttgctatgagtcggttacaattggcgatccacctaagtcttatgaacacctattgcttgaacaagccgataaaaacgcagctagtcaggtagcaagcgctgctggtcatacacaaggattgctaagcaggtataagaatatgcttgctcaagaaggctctaatcgtattgctgcagagcgtaaacttatggacgatctaggattagtacaacaccaagttgaccaaaatgggcgagatattaagactaatctggtaagtatgaagacttttgaaaatcagatgaacgagattcaaaattttgccaacgatatgactaattgggtcatgggatctggttcaggagttattcaagccaatcctaactggcaggagcctacgtcgctgtcagctacaactgctaatgggggacacatgtattttagtggtaatggactggtattcacggacgctggtggtcaagaaataccgcggtcaggcattgactctgaaggtcgtatatatgctgatgcaattaaagccggaaccattgaggctgttaacattaaatcatgcttggttgaaagtgctctaactattggtactgagggaggatcaatgaacatttacattgggactgaaaatccaagaagtcaactaacaccttacaatggtggtaacgttatttgggcaatgtctgacgggtatcaatcaatgatgtcatcaggtcaatttgcggtaacagatggcggcaatgaaactagaattcacccatcttatatcgaggttaatggttatcacgtaataacagaaggaaacatcaattattacattagaaatgcagtaagcgaatcagctattaaagcggctttgggtattccatcatatgcaaatgctgtttgggatggtggctcgtatccacatttatcagagtacattagacaacacattccttctcggtatcgtacgggactataggagtaaaaatgaacaatcaaggaaaaaatttagaatatacgcttgctggcaatttaggcaacatgattggtcagcaagctttgcaaattgcacatttacagattgcattgaagcggaaagatgaagaagcaacacaaaaagataatctaattgcggaactgaaacatcaaattgaatctttacaaaagagaggtggtgtaaatggcgaacgacaagctggtactaaacatcagcaaaattaacatttcacccgattcgaccaggctcaaatatagtcaagatgaacggggaaaacaggttgatataactgtaattgataatgatggcgttactgcttataacttaactggcaaaaaaattgttttttcagaaattaaagatggtgggaaaactatcattgatgatgaatcaacccatttcattagatcagctgacaacgataaaatcgggaagttcacttatatttttccagatcaaacttatcagcaatcaggagaagcgcgatttgaattcacaacggatatagaacacattgactcaaccatcagctttgatatttctattgtaagttctgctcaccttaagcctgataatacgtcctacgtaagctccttggtggcactagaaactcattacaaagcggttatttcaaatgctgaatccaatactcaaaacctaattaatagcctgactgacaaaatcgatcaggctatttctaatgggcaaagagatgtagctaatcagcttactgacatgcgaaaccaacttcaagcgattcaaaaccgagaaaatggtttaattcaaaattggactgctgatttcaacactcgtaaagctgattttgataagttaaagtcagattggcaggcgcaatctaaagctatttcggacagttatcaagctaagatcaatgaaatcaacacacaagctcaatctcagcataacgatatccaggctaaagcagatcagcaactcaaaaataaccagtctgctaatgatgctgaaattgccaagattaagtctgatgcacaagctcaacatgatcagattgaaaaggctaaaactgctgcaattgcagcagttaactctcaaagggatgctgcgattagcaaggcaaatgctgactttaaagctaagatcgatgcctttcaaaaagactatgacgcatggaaatcaaccacactagctgactttactaagcagttagctgatatcaagaccaacataagtaatgaccaatccacgctgaaagattttgacaagcagcttgactacaccaaagaaaagctaacggctatgactaaacagctagatagtttggactttaccaagttcgtgactggtgatcagtttaaggaagctatgagcaaaaaggcgagcggtctaaagattatgggattaggaggcgaatatgtcatggcagtagatcaaagcgatcaaaacatcaatggtttgcctaatagtgtgcaaggattagctgatattggggtgctttcaggggctttacaagtactagctgatgcgattttggacaagaatcactataccaagcctgaagtagataagatggtcaatgatgctaaagctgcaatcatgaataccgtcaacaccaaggctaatgcaagtgatttaaacaataaggctgacaagtctcaaattcagtccttaagttcacaattagaatcttataaacaggaaaacaataatcttaagaatgaaaatacacagctaactaatcgtgttcagacgctggaaagcaagcagttcatcgcacacgtggctcacgaatctgatgtagcaagtcagtcagcgctaattgtcatcgtggatgactagaaaggagtttatatgagcaaactaattttgaaagacaagaatggcaagcaagttgagttcttgaagaaagatgaatttgatggcaaagttaatacgacaaacgctttgcaccaaactaaatttgaaccttataatttgtacgacgctttgtccgaatatggaaatcaaacattaggcgcgattcataataattttagatcaatagataatcagtcattgattggcaattttgattcgttactagtatttggtggtgacgatgttaaacacgcaattgatattggaacctttgaaaaacgagttcgtatttctactaaaactgatgggagtgtttggcaagaagatctggttttaaagtctgactatgacagactttatgatcgtgtatgtgccttagaaaaaaaagtatggagggataactaggtacctatacgcctgtcttatcaatactttagctgcttccacaaaggaggtagcgtaatgaagatttatggtaaaactgacaacggttatagtagacttgcaactttagatgaagtaagtggcgcttatccactagctgggattaatatgcttccggcttcttcaatgcaaaacacgagtgctgaattcttaaaagcatgtggttgggaaagtgattttgatccccaaaaaattcagatagatgatgatggcttaacgcttgactcaatgaactatgattttgtagacatcagtactattctttcaacagacattactccgtccactttctatacggtttctttatcactaatatgagccaacaacctcaatggagatctattctttgtcgaacttgatagtaatggcttaggatttaattaccctaattatcgagatcatcaaattcatgggatagaaaacttaatacttttacttttgaaacaagcaacaatcctgatctaaagcagcttaaattttttattagagcatataaaggctgcgcttttaagtttaagtatttaaaacttgaatatggtaaaaatgccacaatttggactccagcaggcggagacattgaaaaaacatatggagctttaaagtctcaacttggggggggtaaagcctagctataggctttgcgtcacttctttaaaggaggtggcgtaggatgaaagtatatgttaatggttttcttttacttacagatactaatcaactattagatttacagagttcagtaattgatatcagccaacaggctgacgcaaataatttaagcaacgggaattatagattggataacgacctaccagcaaatgttccatctgattgtcattatggacttttaacatgtattaaagtggcaccaaattggacgttacagttttgcatttcttgggatgcaaaaatttacaaaagagcacaaattaatggccaatggacaaagacagaatagtttaaagcatccctagtagatgctttttttatggagaaaataaaatgaaacagaataattcaagaccgccaccagcggtctttttgatacaaaaaatcactagctacagaaaggaaaacattatgacagaagaaactgcaaatacacctgtacaaggtgcagaaaccgaacaacaaaatgtggccaacaatggccaaagtggtaataccgaacaaaagtctaagactttaaatgacgtcttacctggtgaaggaaccaatttggtttacatttcaggcatgctgcaaggtcagcaagttaactgtgaaggaccaatcgaatatacgcgcaagcttgatcatccacaatggccatttattcctgctttaccacagtacgatccaagcaagtgtaagacaccaacgtttgactggggcaaaggtcaatggaaggacgaaagcgaagaggctagagttaagcagcttaatgatttaaccgaaaaggttgcttcaatcacaactgatgtgggcaagattcaagaaactcaagaagccgctgcacaagaaaaagaggctagcgacaagaaagatgatcaagtctttaagctaatttctgctatgaatgttcaattaggtgttatcaacactaagcttagtcaagtaacttctaaggacaacgaggcatctactaagcctgctgtatctgctcaaaatactcaaaacggtacaaccaccgaaggaggtgctcaataatgtttgaaatttataaaatggaattcgatattggaatcgtaaccgctgttgatcttaaaagctacattggtatgggaattcttagtcaacccgactatgaaagaatcgtgggtgatgaatcccatgaagaaagcaattcaacgtctgaagtccaagcttaatgttcgaaatagtgagattttaattggtctctttatcttgggcaaaggattatggctttatcatgacagccactactttatttatccgccgcagtttcaaaacattgaaaatagccgctatatcgatttagggctaatccttttaggtgctctactgatgataacggcttttttagtaccttacatgaagacaaccaagcgaaaaatacagctgattatcgttagcaaagtgtttttagtgttggctggtgttgtgtgtatggttttagcattactgcagatcacacacggaatcttcacacccttttatcgtatgggacactcagcatggggtgactttatcattttttgctttgtctatctgacagctagcgacgcctaagaaggtgccgcgatgaaagatattgggaacgtgatagggtatttgataactgctgtcgggggtctgataagtgcaataactcttttttataaggcgttcagtagtagtaagcaaaatacacttgctggcatgttggctgaaaaagataacgaaattaagcaaaggactgaagatatggagctgtaccgaaaaagatggctcaaggttgaaaaggaaaacgacagattaaagaagaaattggaggaattagacaatgacgattaaagattggatttacttgggaattactgtagcaagttatattatcgctgtaattgctggcgtttacgctaaggacaaagctaagatcaatcgtgccacgcgtgctggtcaagcctacgatgtactaggcaaagttgcgactaacgctgtacacgaagttgagttcttgggtggtactagtaaggaaaagcgtcaaatgggttatgaactgattaaccaagctttgcactacatgggtattaatgatgtgacagctaacatgatctacggcgctttagaaaaggctgtagctgctatgaatttagctgatgttgaaaaaatggaaaatgatcctgctgtagcacaagatgtggatgaaaaagacatcctacaaccagtagatcaattgccaaaacctgaaaatccagctccaaccgatgctaaggatgtgactttagatggcaagtagacaactaggtattgatgcagctgtatatcaaggcactagcatgacagcttatcataatgctggtgcaaaatttggcattatcaaattgactgagggcacgggctatatcaatcctaaagctcactatcaaataaaatcattacatgctaatcatatgtacgttcatgcttatcactttgcgacttttggttataacgttagtcgtgctaaagctgaagcaaagttttttgtgagtcgtgctaaagctgaaaacattagcaagaaacgctatttatggcttgactgggaaactggtagtggtaactgcgttactggaggtaaggtggcaagtactaaggcaattttagcttttatgaaaatttgccacgatgctggttataaagtaggcttgtactctggtgcaagcctgcttagagctgcaattgatactaaaaaggtcattaagaaattcggcacttgtatctgggtagcatcatacccaaccgacttagcttataagccagactttagctatttcccttcgatggatggcgtagctatttggcaattctgtgataactggtgtgggcttggcgtggacggcaacatcagcttgattgacctccacaaagaaactacgactgtacataaggcagccaagccaaaaccaaagccagaaaagaaaactggtgtagtatgtgcgccgattattaactgcaaccctaactggatgatccagctaatggatagtaatggttattacactggcaagtacatcaagacaaatacgagatggaagtacttcgatgtcaagaatatcaagggaatgaaatgctataagttaggtactgataggcagtgggtacctgctaaattcttaaaagtaattgaatagaaggagttgaaaactccaggtgtcgtaaagaccgctctgggacaatgatcctagagcggtttttttgcggttttagttaaaaaatgttgcatatatactaatatgagtatataatataaagagtaaggagtaatgagatgtgctcaggatccttacgaaggtggtggtatccaatgaagcaccgcaaacgtaaacgcgtttctattgaagctcgctacaatagaaaaacagcaattatcaatttgataactgctgtcgttgctctaattgcttcgattgttggattactccactaatccaacacatgagggatcatctcccttgtgtgttttattatactataaattatgaaagtaggtccagaaaatgaatgatgaagaaaagaaatacaataaaactacttctaacattaataaaatagcgttagcaatctttgttatagcagtaataattttcattataggattggtgaagtaagatgtcagttagtgaagcacaaaaaaaggcaaccagaaagtgggataataaaaataaagctcgaaagcaatacttaaatcgcagatcggttaccaaaaattttattttgaaagaagctactacagaagatctggagcaaatcgagaaatatattgagcaaaaaagaaaaaagattaaaaatccagagtagtttaatgaagtatattgtttgtgaggtgaaacgatggattacttgaacggactaatcgaaaaagacagatacgaaacttatcttacaagaaaaaatattttagaagatttaattgaacaaaccttcaaaattcttaagtcttccactgattctaatgaaatcaaagaagaagctaaaaagttagtaaactatcgtttacagctgatagatgtaaacgaatatcttgaaaaaagtaaatagtggtttactatcgctaacagaaaagaagccatcttagagggataacctctgagatggctcttttgatagaactttgatagaaataaatgaaatgcttagaaaagttataaaggatatttgcttatataataaggaagaaaaataccagtaaatacagagaaaaagaataaataaaactctctgtctccgctatatagaaaagtaactgttctagattaatttctagagcagtttttttgtgtaccgagcggcattcttagtccgatgaaagtgttagaactaagagccagtagcaatgatattatgagtatgggacgtttacaaaggagtaaatacctgctgaaacagtaaggaattacaaatgtatcgtcttatatgcaaccatatgtatagtggatggaaggagatgagttcgttaagttctctctgcattgaaaacacgtcataagatgttaaaaccttaattttgagttattgataaacctaaatgcatattattttgaatgacttaatggaaattattacacttcttttaggtaaaagtcttggacattgattcaagtcaataatcgtgtatataacatagggagagccgattgttttaaatttcttcttgtatgatctatattaaaaaaataattttgtgggggatttcatagtgatataaagaagcagtttaatatggaacaatttataaagatcatttagttaaagataagagaagctgttttgctctagctaatttgaagtattaagatagatataaatgttttacaacaaaaaaataaaaaagtacttgcattttgactgaatatctattaatattaaatacgttgtgattgagagatcacaatagtaatagctaattaaaaaaataaataaaaagttcttgacttttgaaatgtgattagttattataataaagtgctcttgagtgagttacatgacccgttggtcaagtggttaagacacggccctttcacggccgtaacatgggttcaaatcccgtacgggtcattgccacaatttattttttggcattaagcaatggaggattacccaagtggcttaaggggacggttttgaaaaccgttaggcggttctgccgcgcgtgggttcaaatcccacatcctccttagttgaatatcgcgggatggagcagtctggtagctcgtcgggctcataacccgaaggtcgttggttcaaatccagctcccgcaatttggtccattggagcagtggtttatctcgcctccctgtcacggaggagatcatgggttcaaatcccatatggaccgtaagatggctcggtagctcagttggtagagcaaaggattgaagctccttgtgtcggcggttcgattccgtcccgcgccatcatctggaggagtagcgaagtggctaaacgcggcggtctgtaaaaccgctctctctgagttcggcggttcgaatccaccctcctccataatagggatatcgtataaaggtagtacatcggtctccaaaaccgctagtgtgggttcaattcctactatccctgtttaccttcatggcggaattggtgaaggggttaacacactggtttgtggatccagcatgcgtgggttcgattcccacattccgccctagtattgggatatagccaagtggtaaggcattagactttgactctaacatgcgctggttcgaatccagctatcccaattctaaataatttcataacttatggcggtgtagccaagtggtaaggcagaggtctgcaaaaccttaatcgtcggttcaaatccgacctccgccttatcaaccgaataagttgattattttaaaatttaatattatggcggtgtggcggaattggcagacgcgtcagactcaaaatctggtgtccattacggacgtatcggttcgaccccgatcaccgctattattatgaagcgatccaattattggatcgctttttttttattttaaaatgttagcattttattatataaattgcacatgaatacaggaatctttataatgctacatatggaggtactcaaatgaatattggtctttataccgatacatattttccccagataagtggcgtagctacttcaattaaaacgttaaaagaagcgttggaaaagcaggggcataatgtatttatttttactactactgatccgaacgtgaaaaaaggaactgtagaaccgaatgtatttcgttttagcagtattccttttgtctcatttaccgatcggcgaatagcatttagaggactatttgaagcaaccaaagtagctaaagaagtcaatcttgatatagttcatactcaaactgaatttgcattaggtactattggcaaatatgtagctcatcaattagatattcctgctatccacacttaccatacgatgtatgaagattacttgcactatattttaaatgggcatttgcttcgtccatatcatgttagacaatttgttaaaagctatttgaaaaatatggatggatgtattgctcctagtggccgagttgaagaattattacggcgctatggcgttcaaataccaattagggtgattcctactggagtagatttgcagggcatgaacaacgatattcaacgtgatgtgcggcaagaacttggaattgatcaagatgcgcctgtaattttaaccttaagtagaattgcagccgaaaaaaagattaatcatattttgaacgtaatgcctgaaattattgatgaatttcctaatgtgaaatttgttatcgcaggtgatggccctgatgttgatgtgttaaaggatcaggtagagcgattaacactagagaattacgttatttttgtcggtaatgtagagcatggcgatgttggtaattattatcgaatggctgatctttttgtttcagctagtgatacagaaacacaggggttgacttatattgaggctctagctgcaggtacgccatgtgtggtttatgacacagactataccgaaaacatttttgatcaagatatttttgggcagacatttactacacaacaagaaatgttagaagagattattactttgcttaagcaagggacgaaaagaatcccgcaggaacttttgcaaaataaattacagaagatttcagctgatcaatttgctaaaaatgtgtctgatttttatcagtatgcaattgatcactatcaacctaagcatgatgaggagactaaaaagaggaactaaatgattagaattaatatgttctcgcaagctgattctgttaaaggacagggtgtaggttcagcttataatgaattgattaaacttctgaggacgcacttagtagacgaattttatgtaacgattaacaaatatggcaatagcgatttaacgcattatcacacgattaatccaacctattacgcaaatagttttttaccagcacgtggcaggaagattggctatgttcactttttaccagatacattagaaggctcaattaagttgccaggcgtagctaaaaaagttttttatcaatatgtaattgatttttataaacgcatggatcaaattgttgtagttaatccaatctttattgataagttggttaactatggaattgatcggaacaaggttagatatattcctaattttgtttcaaaaacagaattttatgaagaatcattggccagcaaaaacgcatttcgtcatgaattaggaattccacttgataaatttgttgtttttggtgatggtcaagtacaggaacgcaaggggatcgatgactttgttaagatggcacaagctaatcctgatattcaatttatctgggcaggcggtttttcgtttggcaaaattactgatggctatgatcattacaaagaaatggttgacaatccacctaagaatatgacgtttgcgggaattgtagagcgagagaagttagttaagtatttaaatattgcagacttatttgttcttccatcatatgatgaattgttcccaatgtcagttttggaagcattcagttgtggaacaccagtattattgcgtgaccttgatctttataaggcaattatcgatggctattatctaagcggaaaagattttggcgaaatgaatcaagtattgcaaaaagtagttgccaatccacaaactttgcagaaatacagcgaattatcgcgtaaggcaagtcaacagtattcagaagatcatttagctaaaatttgggacgaattttatcatgagcaatatgaattaggaaaagagctaggtcaaatacattaatgaataaaaaacatttgtggggcattctggttgttttagcaatcagtgcctttgtgctatatgcagatttaaaagctacaccgatatcggaaatattacgggcagctcatggcctgaatatttttggattaatcatggtttttgctttaatgcttttgtcctatgtatgtgaagccggtatcttagctactttagctcatcgaaagaaagagcctaaaaggtcagcttggtcgtttttgcgaattccaattattcaagctctatttaatgcaattacaccaatgtccacgggtggacaaccatcacagctagccgcaatgattcaaatgggcatggaaggtggccgttccacctcaattttgctgatgaaatttattatttatcagatcgttgttttgtttgcctatgtatttacaattatttttggctttcacatggtaatgactaagttcgctggtttagcaatttttattgcaattggctttttgattcatgttagttcaattatctttttgctggcaattatgtttgcttatcgttttactaaaaaggcaactaattggttaatggacttgttggcaaaaatgatgaaaaaggaacgagttgagaagtggcgtaaggctactttagaaaagattgatactttttatgcagagagtcagaaactaaaaaaagaaaagaagaaattatttgttgcctcgcttttaacagtattgcagctacttttcttttactccgttccatttatggtattaacagcgctaaatgtaccttgttcttggtatcaagttacgcaaatgaatataatgattatcatgtttatggcgatcattcctattccaggtgcgtcaggaggggcagaatatagtttccaaacgttattctccaccttcatttcttcacatggtgcgttaattttggctatgtttatttggcgcttttcaacatattttttcggtatgcttctcggcatcttaggctggatttttaagccgaaaaagataaaaagcacaaaaatgattaatttttattaaaacaacggtgtcttactaaatttcgtagtaagataaattaccgtaatgagaggagcagaagcgcgtggaacacactaaatctttttttaggtggctgacacagactaagttaggcttttttacgattgttttagtcttgttttggcttaaaacttattttatctatttaactaagtttaatttaggagcagttggtccaatgcagcaatttttattgctgattaatccgattccttcagggatgcttttgctgggaattgggctattttttaaaggacgtaaatcctattggattattttagttatcgattttttgctaacactgtggttatttgccaatattttatattatcgcgaattttcaaactttttgtcattttcaattattaagacatcaggctcgacttccgataatttgggtaaaagtattgcaggaattacactagctagcgattttttagcttttgctgatattgctgtaattatcgtgttattggcgaccaaagtaattaagatggatgttcgtccactgaagctaaaagttaatttgttaattgaggctttggctgtcagcttaatgggactgaatttattgatggcccaaaatgatcgttctggacttttgacgagaacttttgataataattacatcgtcaaatatctgggaatcaatgaatacgctatttatgatggctataagacagcacaaactagtgcacagatggccaaagctaatgtttctgatttgaagtctgttagaaactatttaaaagaaaattacgttaaacctaatcccgcttacaccggcgtggctaaaggaaaaaatgtgttaatcatccatttggaaagttttcaacaatttctgattggctacaaatggaaaggtaaagaggtaacgccaaatctgaataagatttatcatcaaaaagagaccattagttttgataatttctttaatcaagtaggacaaggcaagacttctgatgccgaaatgatgcttgaaaattctttatacggactacaatcaggtagtgcaatgtctacgtatggtacttctaatacttttgaaagtgctccagccattttgcatcaacaagctggttatactactgctgtaatgcatggtggtgctggctccttctggaatagaaataatgcttataagtcatttggctaccaatactttatgccactgtctttctatcagaacaaaccaagctactatatcggatatggcttaaaagataaaattttctttgatcagtcaatcaagtacattgagcgtttaccacaaccattttatttaaagatgattactgtaacgaaccactatccgtataatatcgataaaaagaatcagacgattgataaaacgaatactggggatgaaacagttgatggttatgtgcagaccgcgcattatttagaccaagcaattggtgaatttatgcgttggatgaagaagacgggcctagataagaagacactagtagtattttatggtgatcactatgggatttcaggtaatcaccataaggctagtgcagaattgcttaagaaagattcgtttaatgactttgataatttgcagttccagcgagttcctttgatgttccatatgaaaggactaaagggtggcattaatcacacctacggcggtgaaatcgatgttttaccaaccttactgaacttgctggggatcaaagacaaagatacgatccaatttggctatgacttgctaagcaaaaatgcaccgcaaattgtagcacaaagaaatggtgactttatcactccggaatattctaaggtgggtagcgattattatgacaccaagacgggcgaaaggatcaaacctaataagaaattaaaagaaaaattaactgcaatttctaacaccgtaactacacagctgtctttgtcagatcgtgtaattaatggcaatctgctccgattctataaaccaaaagggtttactagagtcaagccgaaggattacgactataacaaggcgccatctttaaaacgtttgtttgatgatccaagcaaaacttcactgtggtatcaaaatcatcgtaaaacgacgcaaaaagatttcaagacagatgcgcctgaactaaaaaaataactgcaaaaactagtaatttgtgataaacttggtaagtaaatcgtatgtgtgtattggaggcagcgcattgtataatttagttatgacgctactaatcattgtttcaatcttaattgtcattgcaacaatgatgcagccacaaaaacaacaagatgcattgaacgccttatctggcggtgccgtttttagtgggcaaaccaaaaaacgtggttttgaagcatttatggaaaaagtaacctcagttttattggtactctttttcgtctttgctattatcttagcttatatgtcttcaaaataaattttgtacctcccgatcaaaatatgatggggaggctttttttattaaatttaaagatcggagaataactgcatggcacaaaacgaaaaaattttggccggcgttttagaaatttttcgccataatccacaaaaacaatttcgtgtagatcaaattgaacgtgaagcacgtcgtgatagattaggtaattttactgaattaattaaggctctttcttttttagagcacgataaaaagattattacagatggcaaaggacaataccaattagctcaagaaaatactgaagttgaaggtgaatttagagctaatgataaaggctttggctttgttagattagatgatgaaaatgcggacgacgtctttgttgccgcagattataccaagtatgccgttaatggtgaccgagtaaaagtaaagatcactgctggtggtaatccttggaatggtaagggaccagaaggtcaagttgaagagatccttgaacatggtttggaaacgttagttggtgaatttcatccgctaactgatgaacaaagaaaaaacagtcattttatcggctatgctttgagtaacgataaaaagttgcataaataccgggtttatttgtctgaaaatggcttgatccctcaaatgggcgatatggttaaggtctcaattaaggattatccagatgaggaaaatcctgagtcaatgactggtgcagtagtcaacattattggtaataaaaatgaccctggcgttgacattatgtcaattgtggcagcacatgatgtaagaactgaatggcctgaagatgcaatggcgcaagctaatgctattcctgatcatgttactgaagaggaaaaaaagggtagagtagatattactgaccaacctgcagtcactatcgatggggatgattctaaggactttgacgatgctgtagttttatggaaaaagcctaacggcaattatcaccttggtgttcacattgcggacgtttctcactatgtgacagaaaatacgccgttgaacgaagaggcatttgctcgtggcaacagtacttacttagttgatcgggtaattccaatgctgccatttagactttctaatggaatttgttccttaaatgaaggcgtggaccggcttgttttgtcatgtgacatggaaattacgccagaaggtaaaagagtaggttataaaatttatccttctgttatgcgctcacatggtcgaatgacctacaacaaggttaacaaaactcttaagggcgaaatgaatggtttagaggataagtatgttaaactccgaccaatgcttgaagaaatggcagatttgcatgctgctttgtataaacaacgtcatcaacgtggtgctattgactttgaagaaccagaagcaaaaattattgttgatgatcaaggcaagccaacagatattgttttgcatgaacgtggtactgccgaaaagatgatcgaatcatttatgttaatggctaatgaaaccgtggccgaagatttcttcaaaaagcatgttccattcttgtaccgtgttcacgaaacaccagatgccgaaagaatcaagactttctttgaattttgtagcgcatttggcttgaatattcatgcggatccaaataacgttaagccaattgatttacaaaaagtagtttctaaaactacagatactccagaggaagctgtagtacaaatgatgatgctacgtagcttaaagcaagcgcattattcagaagaagcactgggacactttggcttagctgcagaatactatactcactttacttcaccaattagacgttattctgacttgatggtgcaccggatgatccatgcatatcaagaccaggggactaatgaagaagtgcaaaagcattttgctagttacttgccagatgttgcagaacaaacttcaacgcaagaaagacgttcaattgatactgaacgtgaagtaaatgacttgaagatgacagaatatatggccgatcaagtggggcaacactttgacgcggtagtatcttcggtaactagttttgggatgtttattcaattaccaaatacgattgagggattaatccatatttcgaatttgactgatgatttttacagttttaatgaaaaagcattgacgctaactggtcgaggtactcataagcaatataaggtagggatgccaattaaggtaaccttgattaatgctaacgttgaacaacatcagttagactttgaaatatatgatcctaatgcgcctaagcataagcataacgatcgcggaatgaataatcgtcgtcgtggaaaccgtggcttccgcaataatcatggacgccgtggtggtcagtttaataatcacagcgatcatggccgtggccgaggtaatggaaaccgtggaggtcggagaaattttaaacattagggattgatcttaatgaaaaaagaaaaagaagataatttaattgcacaaaataaaaaagcacgacacgactattttattaaggaaacattggaagcaggaattgctttaactggaaccgaaattaagtctgtacgagctagaagaatcaacttgcgggatggttatgtgcagatcgtcaacggacaagcctggctagaaaatgttcatattagtgaatataagcaaggcaatcggtacaatcatgagccactacgtagtcggcgccttcttttgcataaaaaagaaattgcacgtttggccaaagcacaatcagagcgtggtattgcaattattccacttaaagtgtatttaaaacatggctttgccaaggtattgattggtgttggccaaggtaaaaaggaatatgacaaacggcaaacaattaaagaaagagaccagaagcgcgatattcgacgcaagtatggtgtctaagatgagtctgagaagaatctcagactttttttgttgaaaaattttaaaaagttttttttattttcacaaagtaatgttcgaacaatttgaagaatgcagagaaaatcaagctaaatatttttttaattattatagaggcgaataatagtattaagatacgtttgatattgaaatattcatattaaaaatccgaacgaagagcaagacttgccaaagcgaagaaaataaggtaaattaataaagtcgcttcgagagatgcgacgagagcttaaaaacagacatgtaaggaaagaaaacaaataaaaagaaaaaagtacttgcaaagaagtaaataagctggtaatatatttaaatgtcgtcaggtgaaagcagaaaaagcttgagcaagacgaaaaaaacaaatcaaaaaagttcttgacaaagaaatgatggtttgataaaatataaaagctgtctgctttgcaaaaaagcaagacagaggtagtactttgaaaactgaacaaagtttcgctaaaagtgtgcgggtgtaaaaacccaaacaagaagcgaagtcaattcgcaagcaataaatttgagacaaagatcttaaataaggaatgagcaatcattcaaactttttaaaatgagagtttgatcctggctcaggacgaacgctggcggcgtgcctaatacatgcaagtcgagcgagcggaactaacagatttacttcggtaatgacgttaggaaagcgagcggcggatgggtgagtaacacgtggggaacctgccccatagtctgggataccacttggaaacaggtgctaataccggataagaaagcagatcgcatgatcagcttttaaaaggcggcgtaagctgtcgctatgggatggccccgcggtgcattagctagttggtaaggtaaaggcttaccaaggcgatgatgcatagccgagttgagagactgatcggccacattgggactgagacacggcccaaactcctacgggaggcagcagtagggaatcttccacaatggacgcaagtctgatggagcaacgccgcgtgagtgaagaaggttttcggatcgtaaagctctgttgttggtgaagaaggatagaggtagtaactggcctttatttgacggtaatcaaccagaaagtcacggctaactacgtgccagcagccgcggtaatacgtaggtggcaagcgttgtccgaatttattgggcgtaaagcgagcgcaggcggaagaataagtctgatgtgaaagccctcggcttaaccgaggaactgcatcggaaactgtttttcttgagtgcagaagaggagagtggaactccatgtgtagcggtggaatgcgtagatatatggaagaacaccagtggcgaaggcggctctctggtctgcaactgacgctgaggctcgaaagcatgggtagcgaacaggattagataccctggtagtccatgccgtaaacgatgagtgctaagtgttgggaggtttccgcctctcagtgctgcagctaacgcattaagcactccgcctggggagtacgaccgcaaggttgaaactcaaaggaattgacgggggcccgcacaagcggtggagcatgtggtttaattcgaagcaacgcgaagaaccttaccaggtcttgacatctagtgccatttgtagagatacaaagttcccttcggggacgctaagacaggtggtgcatggctgtcgtcagctcgtgtcgtgagatgttgggttaagtcccgcaacgagcgcaacccttgttattagttgccagcattaagttgggcactctaatgagactgccggtgacaaaccggaggaaggtggggatgacgtcaagtcatcatgccccttatgacctgggctacacacgtgctacaatgggcagtacaacgagaagcgagcctgcgaaggcaagcgaatctctgaaagctgttctcagttcggactgcagtctgcaactcgactgcacgaagctggaatcgctagtaatcgcggatcagcacgccgcggtgaatacgttcccgggccttgtacacaccgcccgtcacaccatgggagtctgcaatgcccaaagccagtggcctaaccttcgggaaggagccgtctaaggcagggcagatgactggggtgaagtcgtaacaaggtagccgtaggagaacctgcggctggatcacctcctttctaaggaagcgaaggatatggagagcaggaatgctaagagaagtatccagagcaagcggaagcacactgagaaactttgtttagttttgagggtagtacctcaaaaagagctagtacattgaaaactgaatataatccaagcaaaaaaccaagacaatcaaagagaacagattgtagagcgaccgagaagagaattcttgagtaaggtcaagtagaaaagggcgcacggtgaatgcctaggcactaacagccgaagaaggacgtgacgaactacgaaaagcttcggggagcggtaagtacgcagtgatccggagatatccgaatgggggaacccaatgcagagatgcattattgattagtgaatagatagctaatcaaaggaagacgcagtgaactgaaacatctaagtagctgcaggaagagaaagaaagatcgatttccttagtagcggcgagcgaagaggaaagagcccaaaccaagtgatttatcatttggggttgtaggactgcgacgtggcagtgtaagagatagttgaattatctgggaaggtaagccagagagggtgagagccccgtaagcgaaatctcaagcacgcctagcagaatcctgagtaggccgggacacgaggaatcccggttgaaaccgcgaggaccatctcgcaaggctaaatactagttagtgaccgatagtgaaccagtaccgtgagggaaaggtgaaaagaaccccggaaggggagtgaaaaagaacctgaaaccgtgtgtctacaagtagtcaaagcacattaaagtgcaatggcgtgccttttgtagaatgaaccggcgagttacgttatctagcgaggttaagtcagaaaagacggagccggagcgaaagcgagtcttaatagggcgaaaagttaggtgacgtagacccgaaaccaagtgacctacccatgaccaggctgaaggtgtggtaaaacgcactggagggccgaacccacgtaagttaaaaattgcggggatgagttgtgggtagcggtgaaattccaaacgaacttggagatagctggttctctccgaaatagctttagggctagcctcgtggagaggataatggaggtagagctctgtttggactaggggcccgtcaggggttactgaatccagataaactacgaattccagatatccatacacgggagtcagactgcgagtgataagatccgtagtcgaaagggaaacagcccagatcaccagttaaggtccccaaatctatgctaagtggaaaaggatgtggagttgcgtagacaactaggacgttggctcagaagcagccatcattcaaagagtgcgtaatagctcactagtcgagtggcgctgcgccgaaaatttaccggggctaagcatagtaccgaaactgtggatgtgttttaaagagcacgtggtaggagagcgttctaagagcggagaagttgaatcgagaggatcaatggagcgcttagaagtgagaatgccggtatgagtagcgaaagataggtgagaatcctatccgccgaaagactaaggtttcctggggcaggctcgtccgcccagggtaagtcgggacctaaggcaaggccgagaggcgtagtcgatggataacaggtagagattcctgtactgtgtcaaatcgttaagagcgaaggagggacgcaggaggtgaagcacgcatcgcgatggaacgatgttcaagcaacaagtgcggttaagagtcaaatgcttctaaccagcaacacgagttgtgaagaggagtgaattaaaagtagcgaaggtgtggtaatcacactgccaagaaaagcttctagccagagatgacatacccgtaccgcaaaccgacacaggtagtcgagtggagaacactaaggtgagcgagagaactctcgttaaggaactcggcaaaatgaccccgtaacttcggaagaaggggtgctagccaagagattggttagccgcagtgaataggcccaaacaactgtttatcaaaaacacaggtctctgcaaaatcgtaagatgacgtatagaggctgacacctgcccggtgctggaaggttaagaggagagcttagcgtaagcgaaggtttgaattgaagccccagtaaacggcggccgtaactataacggtcctaaggtagcgaaattccttgtcgggtaagttccgacctgcacgaaaggtgtaatgatttgggcactgtctcaacgagagactcggtgaaattataatacccgtgaagatgcgggttacccgcgacaggacggaaagaccccatggagctttactgtagcttgatattgagtatcttttaaacatgtacaggataggtaggagccagagaagataggacgctagtcttattggaggcaatgttgggatactacccttgtttgaaggatgctctaacctcgacctgtaagccaggccagggacagtgtcaggtgggcagtttgactggggcggtcgcctcctaaagtgtaacggaggcgctcaaaggttccctcagaatggttggaaatcattcgcagagtgtaaaggtataagggagcttgactgcgagagagacaactcgagcaggtaggaaactaggacttagtgatctggtggtaccgtatggaagggccatcactcaacggataaaagctaccctggggataacaggcttatctcccccaagagttcacatcgacggggaggtttggcacctcgatgtcggctcgtcgcatcctggggctgaagtcggtcccaagggttgggctgttcgcccattaaagcggcacgcgagctgggttcagaacgtcgtgagacagttcggtccctatccgtcgtgggcgtaggaaatttgagaggagctgtccttagtacgagaggaccgggatggacgcaccgctggtgtaccagttgttccgccaggagcatcgctgggtagctatgtgcggaagggataagcgctgaaagcatctaagtgcgaagcccccctcaagatgagatttcctttgcgtaagcagtaagacacctcagagacgatgaggtagataggctgggagtggaagtcctgtgaaggatggagcggaccagtactaatcagtcgaggacttgaccaaagcgaagcaaactggaaggttttttgcgagaaggattatgtttagttttgagtgtaaaagctcaaaagagtacggtggcgaaagcaagaaggatacacctgttcccatgccgaacacagaagttaagcttcttaacgccgaaagtagttggtgggcaactgcctgcgaggaaaggaagctgccgtgctcttttttaatattccggcttagctcagttggtagagcgcttgactgttaatcaagatgtcgtcagttcgagtctgacagccggagtactttgtatggaatgttgtccgagcggcttaaggagcatgattggaaatcatgtatacgggcttatacctgtatcgagggttcaaatccctcacattccgtaaatatatatgaattggaactatgttaacatagttcctttttttctacctaatttttcatatataatggagaaagggaggaaatatcgtgaagctacgaaaactaattccatttttatttttaatatctctattagctataacattttccgcttgttcgacaaagggagaagagaatactgctaagcatagagttaatattgtaacttctactaatatttatgcagatattgctaaaaatatagttggtaaacatggtcatgtacaagctattataaaaaacggcgatacagatccacatgattttgagcctacgactggctctgccaaagaagtagctaatgctaatattgttattgccaacggtctaggatatgatgactggatgactaatttagccaatgctaatgatattcatgtggttaaagttggtaatcaattgatgggattaaaacagggggataatcctcatatttggtataacttaaacatgcctaaaaagtatgttgattatctagttaaaacagcaagtaaaattgatccaaaacatgcagcatattttaagtctaatgctgcaagctatttgcaaaagattgatagtataaagaaaattgctgctaaaattaatgggcgtgaagataaaccggtttatgttagtgagcccgtgtttgattatgcactagaacggtgtcattttaagattggcaatcaggcatttgaagaagctgtagaaaatgaaacggatccgagtgcgcaagttattcatgagatgcaagtcaaaattaaagctagaaaaattgctttctttgttaataatattcaagcatcaagtagtacagttagtggcatggttaaactagcagagcaacataatattccagttctcgatgtaagggaaacaatgcctaatggaattagttattattactggatgaaagcgaattatcaaaaattatttgaaattttttaaaaataactattgcataattagggactatcaggtaatataataaacgttgtgattgagagatcacggtggtaataactaataaaaataaataaaaaaagttcttgacttttaaaacatgattagttattataataaagtgctcttgattaagagatatgacccgttggtcaagtggttaagacacggccctttcacggccgtaacatgggttcaaatcccgtacgggtcactaatggaggattagctcagctgggagagcatctgccttacaagcaggaggtcacaggttcgagccctgtatcctccattgttcgggactaccgccgccgcggtagtctttttttatgcaaaaagaacgaacaagcaaaattattattttatcggttcaagtcctgagaggattcactatgattagtgaagatgccttgtaaccgaatagccaatgtctatatagggggactaatatggaaagacgtttgtttacttcagaatcagtttctgaaggacatccggataaagttgctgatcagatttctgatgcaattttagatacgatgttaaagaatgatcctaattcacacgtagcttgtgaaacgatcgtaactactgggatggtttttgtctttggtgaaatttctaccaacgcttatgttgatattcaagatgtagtgcggaagactattttgaagatcggctatgatcgtccagaattaggttttgatggcaataactgtgctgtgatggttgacatcgatgagcaatcacctgatattgctggtggggttgatcactcacttgaaactagagaaaacaagtctgataacgatgaattggatcaaattggtgctggtgaccaaggtttgatgtttggctttgcgattaaagagacacctgaactcatgccattaccaatttcgcttgctcatcgtttaatgagacgtgttgctgctttgagaaaagaccatactttagattggcttcgtccggatgctaaggctcaagtcactgttgaatatgatggaaacaataagccattaagagtggatactgttgttatctctactcaaactgatgcagaagtttctaatgaagaaatccatcgggcaatgattgatttagtcattaaggaagttattccggccaagtacctagatgaaaagactaagtttttgattaatccgtcagggcgttttgttattggaggtccaaagggcgattctggtttaactggtcgtaagattatcgttgatacctatggtggttacgctcgccacggcggtggtgcattttcaggtaaggatccaacaaaggttgaccgttcagctagttatgcagctcgttatgtcgctaaaaatattgtggctgccggccttgcttatcgctgtgaagttcaattggcttatgcaattggtgtagctcacccagtttcaattatgattgatactgcgggtactggtaaggttgacgatgatttgttaactgaagcagtacgcaatgtttttgatcttcgtccagccggtatcattaagatgcttgaccttcgtcgtccaatctatgaacaaacggccgcatacggtcactttggtagaacagacgttgatttgccatgggaaaagactgataaaacacaagatttgcttgattatattaaaaataagcaataaataaaaagaggaagtaaaaaagaatgaaaaaaacaaacgtgcctatagtcacgctggcgatttttatgacaacttttatgactgccattgaagggacaattgtttctactgcaatgccaaccatagtttctgacctagatgggctcgagattatgaattgggttatatcaattttcttgctaatgacggccgtttcgactcctttatatggaaaactggcggatagcattgggcggaagccagtttttttgtttggaattgcgttgtttgtcataggctcatcgctgtgtggacttgcacaaaatatggtggagcttatcttattcagagtaattcagggattaggttctggcgcggttcagccagttgccatcaccattattgcggatttatatgctctgcaaaaaagagcgaaaatgttaggtcttaactctggtttttggggagtagcatcagttattgcaccgctattaggtggctttatagttcagcatctatcctggcactgggttttctacatcaatgtgccaattggaataattgcctttttgctcgtaattttttgtttgcaagagcctaaacatagctctaagtctaagttagatttgcagggaaccatttggttagtaattttattgctagctttgatgtttttcttacaagatttaggttcaaacactaatatcgccataatggccgctctagccgttttagtggtaattagtataattatgttctttagagcagaaaagcgcgcagttgatccaataatgccactcactatgttaaaagataaggagttccttgcaattaacctgattacgttattgatttctggcgtagtaatcggctttgaattttacattcctacctggatgcaaggtattaatggtactaatccatctctagccggttttgctgtaacgcctagttcattaatgtggattgtaggttcgttcttaattggcgggatgctaggccgctgggggattaaaaagacatatgattatatgttattggttttagttgtggccgatttggttttgattttagtgccgatttacacatcattctgggtcttctgtgttattgctgcctttaatgggaccgcctttggggcaattacgacagcttcacaggtgagatcgcaggttttggtacctaaggatgacataggtgttgccacttcgtttaatacgctgatgaagtatctgggacagacaatgatggtttctatctacgggattgcttttaatacgatgttggcgcatgggttaagcaagagaccggggttgaatcaagaaatgatgaataaaattgtttctgcagaaaatgccaaaagtctggctgccaatgtagtgccacaattacggcaagttttgttaggcgggttaaaagctgtttacgttgtttctatgattgttattgtagtctcgattgtattgaatcaattgtatcgagatcgaaaattgaagaaaaattaagttgaaggagccacatgcaaagtagagcatgtggcttttttactggaaatttaatttcagtatttttattatatctacatatattgaaatattatttctatgaaagtaaaatagagttaaaagcaaggtgattaaatgaatgttagagatagaattttagagaattatacagagttaaaaaaatcatcacgtattattgctgatgcggtacttgaaaatccaaaaattttgttaaataaaaatgctaaagaaatagggaattatactaatacatctgcagcatcagtaattcgtttttgtaagcaattaaattataaagggttaaaggactttcaaatcgatttagctcaaagtactgtcaaacagtcacaacttaagccaatagatatgattgtaactaaagatgacaaagctgatgaagttatgactaaattaagggttagtttgagtcaaaactttgaagatttatctaagactattgatatcaaggatttacaaaaagctgtatccttaattaaaaaaagtcgagctgtgtatatagctggtattggggcttcaagcttttctgctaaggatcttttttataaactcattagaagtggaaaaacggttttttataatgatgatgtccacattgcattagagagaatatactattcaacgccaaaagatgtcatgatatgtttttcttatagcggattgactcaggaactattacttgcagttaaacaagctaaaaaaaataaaacaccaattgttgcagtgactagaaaatccgaatcccctttgagtaaattagcagatataaatttaaaattaccggatcatgaatcgctgatgagagttggtgctataaattcaacttttgctcaaatgtttatttcaaatgtgctttatttatgctcaatttcaagtgatttaggtgaggtaaaacaagaaatggaggctacaggaaagcttctcgaaaaattaaaagaaaggaatgattaatatgaatatcaaggatttaactacagagaaaagaaacagtgcaactatgcatatcgataatatgtcaactttagatatggttaaaactattaataaagaagatcagaaagttgctgaagcagtaggaactcaggaggagcaaattgctcaggcaattgacatggcttctaagaaataccatgatggtggacgattaatatatattggagctggcactagtggaagattaggtatattagatgcagtagagttagtaccaacgtatggaattagccctgatcgtgcaataggattaattgctggcggtaaaactgcaatgtatttagctgttgaaggtgcagaagattcagaatcacttgctgctgaagacttaggtaagctaaatttaactagtaaagatgtagttctaggattagctgctagtggtcgaacgccatatgttattggaggattagactatgcacaaaaaatcggtgcagggacaatttcaattgcctgtgttaataatagtttaattggaaaacatgcagaaatagctattgaagctgtagtagggcctgaagtaattactggatcaactagaatgaaagcaggaactgcacaaaagatgatcttaaatacgatttcaacgggcgtaatgattaaacaaggaaaagtttatcaaaatgttatgattgatgtcttgcctactaataaaaagctagtaaatcgagcaattagaattattacgtcagttactaacgtatcaatagagcaggcgaaagatgtcttgcttaaagctgataaaaatgtaggattagcaattgttatggcaaaaacagggttaaatagtgatgatgcaagtaaactattagaaaaaaataataacaatgtcagccaagttttaaataattagctatactttgaaattaaatttcaaaaatcattgattatatgtcttaaaagtgatatttttatatttaagtaagcgcttactaataaagaataatgaaatattatttctatttgtacaaaaattgcatattagtgattgctttttcaaaagagttttgataatactactttgctaatgaatattagtaataagtaagggagggagaataatgaaacatcgcaattttttattagttgctctttcagttttacttttaggagcaggcttaactggatgcagtcagaaaaaagaggctacagctactccggctgttacacctcataagagtcaagttgttacaacaactatgtattcgaaaaaattacatatggattggaattatgatgtatatttaccagcaggttacaatccaaaaagcagtaaaagatatcctgttttatatatgttgcatggaatctatggtaatcatagaaacttgctagaaagatttaattctcaacaaattcttgatggagaaattcatcgctgtaataaaaagatgatcgtagtttttgttgatggctttaatagcttttatattaatcaaaagcaaggtgggatgcagatggaaagtgccatcgttgatgacatggtccctactattaataaattgtataagacagaaaccaatcctaaacatgtaggtattggtggtatctcaatgggtggatatggtgctgccagattggctttgaaatatccagatatttttggaaatggtgttctaatttctcctgcagtttggtaccgcttgccgaataacaacccaattaaaacttcacagtatgcttttcaagatggaaaaagtaactgggattggaaattttatgatagtgtatttccaactaggtacattaatagtaaatcagagaaagataagttctttgtagagactacttcaagtgatactaccgttccagtaaaaaatgtcgatcgctttgtgaaaactcttaaaaaccatgacattagtgttaagtttgtaagagacaacggtggcaaccataattgggcttattggacttcagcagctccacaagcttatcaatgggcattagataatttaaattaggaggtgtaaaaaatgagcaaagatagtgaattagccagtagcattttgaatgatattggtggtaaagacaacgtttccgcagttatttcatgtatgactcgtctacggattagtgttaaagatgattcaaaaattaatttagatcagttaaagcggcttaatggagttttaggagtagttcagtctgaaactttacaagttgtactgggaccgggaaaggttactaaagttggaactgaatttagtaaattagccggtgtgccacttggagaagaaggcggcgatgattccaatgaaacattagatgaagttaaagctagagctcaaaaaaataaagcggcacaaaaagctaaacatgataagcctttacaacgtggattgcatcatattgctaatgtttttattcctttacttccaggaattattgctgcaggtttagtcaatggtatctgcaatgttattgattatcaatctggtagtgcttttgccaatgattggtggtatttaactattaaaacaataggatggggactatttgcattcttaccaatctttgtagggatgaatgcagctaaagaatttaaaggtagtgcaattctaggtggaattggtggtgtattctgtttaaatttaacaggttttgctgcgtaccctttaaattcactggcagtatcaatgccattcactaataagccatatgttgctggtgttggtggtttgcttaccgcactgtttatggggatctttatcgcatggacagaaagacagattagaaagtttatgcctaatgctttagatacattcttaacacctctttgcaccctgatcttttgtggtttaatttcagtggttttcttacaaccagttggtggttggctaaccaatattatttacgtggctatggacttcttatatgataagttaagctggttcggcggttatattttatcgtcaactttcttagcattagtatctgttggtttgcatcaagctttaacgccaattcatgttatgctgaatgaccctactggtccaactcatggaattaactatttacttcctattttaatgatggccggaggtggtcaagttggtgctggttttgctctttggcttaagagcaaaaataagcgttttaaaaatatggttatgagttcaattcctgtagctattttaggagttggtgaaccattaatgtatgctgtgaccttaccattaggacgtccatttattacggcttgtcttggtgctggtttcggtggtgttgcagcatcattattccatttaggtactgtctcacagggggtatctggattatttggactgttaattatgcagccaggtcaacaggttgaattcttgattgctttgttaatttcttatgtaggtggctttgttttaacatggttctttggaatagatgaagcaagaattaatgaagtctttcctgaatgataaaattaaagaagtaattgaaatcattgtaactattacaatgatttttatttttaacggagaagaaaaaatgctaggaatatctgtatatttccaagattatgatgaaaactatttgaaaaaagcagctcaagctggtgcaaaatacgtttttacgtcacttcagattccagaagaagattattcagatctggatcaaaaattaccgagattttttgaattgtgcgatgaattgggacttgaagtaattcctgatgtttctccggctacattggaaaagctaggaattaaaggaggcgattttgaagccttaaaagataagggattcaaggccttaagattagattatggttttgatgactttgatttaatcaaaaagctacaaagaaatttctttattttattaaatgcaagtgttgtgtcactggactatttagatcgtgccagaaatgcaggggttgattttggtaaattagctttaacatataatttttatccgcatacagatacaggtatgggatggacagattttaaacgtaagaattggatgttaaaggactatggcttaagaactcaagcttttgttcctggggatgcacttaaacgtttcccactatatgaaggcttgccaactgtagaaaagcatcgtggagtttcgccttacgttgcagctgttgaattaattcatgaagcaaatgtggatgatgtgtttattggcgatagcaaggcatcaatcaaaaatcttcggtatattgtagattatcaaaaagataatattttaaacatagaatgttcgctattgccacaatatcaacagctgtatgatcaagtgattgaagtaagaaaggacatgccagaaaagctgattcgcttaagtttgcctagaaaacctgatattccaatttgtaatactttaaataggcgtaaaggcactattacaatgcaaaacaaattagctcaaagatatagtggtgaagttagtctgattaagtcaaatttaccttttgaagcacgtagtaatgtgattggttttatttcacctgagtatgtgaagttgcttgattttattgattcgagtacgaaaatcatttttagaaggctgacatagaagaaaggtgatattatgcttaatttggcaaataagatttcagatgtatatcctaatttgaataaaacttctaagttgattgctgatgtttattttaaagattcaactcttttcctaagtaaaaacttgcaggaattaggtgctattactaaaacaagtggcgcatcagtgattcgattttgtagaaaattgggtttcaaaggctttaaagattttcaaatagcttgtgcacaagaaatacctggcaagcaagataatacggtggatacaattattaatgaaaatgatgagccgaccagtgtgctttacaaattacagattagtttagaaaaaaatattgcagacattggcaaaacaattgatcatcaatctctagcttcagcggtacaattaatgcgagccgcacagaagatttatgtagcaggagagggtgcatctggcttagccgcacaggatttattttacaaattaattcgtagcggaaaagatgctgctttcgtccaaagttcgcacattgctttagagcaagtagctaatattaagacagaagatattttaattaccttttcttatagtggattaactcaagaaccactgctaatggcaaaacaggcgaaagaaaatcaagctaaaataattgcagtaactcgtgcccagaattcgcccttaaaggatattgctgatactataattgcgttaccatcaaatgaaaaattgttgcgttacggcgctgttaattcactatttgcagaaatctttgcttctagcttgctatatttgagtcttatttcgccaaatttaaaagaactaaatatgaaaatgaaaactacgcaaaatttgactaatcaattaaaagtgtagaatctataaaataacaactaaataaattttaaaaaatcaaaaatattttcatgatgaaaataataaaaataaagaaaaaaaggaccagtttggtccttttttagtactttttttgcggttggaataaatctatatttgacaatgctataattataaatggaaagtggcctaaaaataagataacactattgaaagcgcattatttgcctccttgaaagtaaatctaagtagctgtacacttaaattgagctgaataacgaacgttattttttggcagagacttgtaatgcgagtaggaattatgggggcgtaaaaatggatattactagtttagcaagattccaatttgctatgacgacgatctttcactttttcttcgtgccattttcaattggtacgatattcgttgtcgcaattatggaatcaatgtatgttcatacaggcaagcctgaatataaaaagatgaccaagttttgggctaatatctttttattgagttttgccgtcggtgttgtaaccggtatcattcaagaattccaatttggtatgaattggtccgattattctagattcatgggggacatctttggtgctccacttgcttttgaagcattgttgtcattctttattgaatctacctttattggtttgtggatgtttacttgggataaagtggggaagaaattacacttattctttggatggatgatcgtctttgggacaatgacttctgcattatggattttaacagcaaactccttcatgcagcatcccgtcggctttgctttacgcaacggtcgtgccgaaatggctgactttggagcacttcttaagaatccacaattaatgtatgaatatggtcacgtaattgttggtgcacttttaactggtactacaattttgactgggttagctgctttccaactattgaagaaacgtaacctttcagacattaacaagaagatctatcgtaagacaatgcgtttaggcttaatcttaatgttaattttctcagctggtgaaattgctgtgggtgatatgcaaatgcaatatactttgcatgatcaaccaatgaagttcgccgcaactgaagctgtttataagacaactggagaaaaggctccatggacggtagttgcaattgctaatccaaagacccatgaagttaagggaattgatattccagacatgttaagtattctttcttaccacaagactactggttctgtaaaaggtatggaagaaattaacaaagaacttgaaaagaagtatggtacacatattgatggtcgcaagatggactactatgtaccagttaatactttattctggtccttcagagtaatgtgtggttttgctgcattattattcttgatggcaattgttggtttaatcatgactcgtaagaataaagaaaccctttataaccatcgttggctattatggatcttcgcacttcttacattctcaccattcttggctaacactgccggttggttaattaccgaacttggccgtgctccatggacagtttatggattatttactattgatcaaagtgtttcaccgaatgtttcagtggcttcacttttaacatcaaatattgtttacttctgcttatttactattttagcaattatcatgattgcattggttgttcgcttcatgcacaacgatccagatgaatatgataaggctcaagaggcaagcaaagtagttgatccgttctcaaagggggccatttaaaatgtcatttttacaaatactttggtttatcttaattggagtattgttctcaggcttcttcttccttgatggttttgactttggggtaggaatggccgtgaagactttagctcataatgaacctgaaagagatcaagttgttaggacaatcggaccagtttgggatggtaatgaagtttggttgattactgctggtggtgcaatgtttgcatcattcccatactggtatgcaaccttattctcaggttactatttaattttattattgatcttagttggcttaattattcgtggtgtgtcatttgaatttagagcaaaatgtgctccatatcaaaagcatatttgggataatgcaatggcgatcggtagcgtaatggccacctttctctttggggtaatgtttatctcaatgattaaagggatgccaatcgatgctaaaggcaatatttcagctagcttctttgactactttaactggttctcaatcgttggtggtattgctttaacacttctttgctatttgcacggcttaaactatattactattaaaactaagggcgttatttcagatagagcacaaaactatgcacaagctttatactgggtactctacgtcggtgaagttgtctttgctttattattgattttccaaaccgacttcatgagagtacatccaattgcaactttagtatgcttagcattaattgttggtttctctgtagcagcacatgtagctactttcactaacaagcaaggaatggctttaacttgcagtggattaacgttgatctcattggtcgccttaatcttctgtggtttattcccaagagtaatgatttcatcaatcagcagtaaatatgatttgttgattcatagtgcatcatcatctaactacactttgattgttatgactgttgctacttgcatcttggtaccatgtgtcttggcttacaccatctgggcatattggatttttcgcaagcggatttcaatgccaagaatcggagaggttaaataatgattgataaacagctatttaaaattgatggcgctggttcaatcttaaaaaaacttgcagggcttgagattctgcaagctttttttatagtaggacaagccttggcactagcgtcagtcttaagcaaattgtgggcaggtcaacctctcgattggctactactaattacttttgcagcttgctttatcgccagacaattgatcagcacactgagagattcaatgttagaaaaatattccggtcgggttgcagaagaattaagacagcagcttttaaataaagtctttcgtgatggacaggctttagtacaaaaacaaggaaccggtagtttgattactatgtccctagatggtgttgatgaggtcaggcaatacattaagttaatctacagcaaagttttaacaatgatgattgtgccagttttaatctttgtcggcatgctgtttttaagctggacatcagctgtgattctgctagtcatgtatcctttaattgtcttattcatgattatcctaggtcatgctgcacaggatcgagcaattaaacaatttggtaactttcaggttttatctaataactttattgattctttaaggggaattgatacgctgaagtatttaggcctgagtaaaagatattccaagtcaatttttaacttgagtgagggttttagaaaaaagacgatggcggtgctaaaagtagcaatgctttcaacttttgccttagactttttcactaccttgtctattgcaatcattgctgtttttcttggttttgacttgatgaatggaaaaattgcactttttcctgctttaggaattctgattctggcgccagattattttttgccaattcgagattttgcgggggatttccatgcaaccttgaatggtaaaaatgcctttaagcggatcaacgaattgattaatctgccagaggaaaaaactaatgatttacctttaaaaacttggtcagctcaagatcaattgaagatcaagaacttgaagtttacttatcaaaagggaaccgaaattggaccggtttcattacaagtccaaggattcaagaaaattggcattatcggaatgagcggatctggtaaaactagtttaattaacctgctcagcggctttttgactccggatcaagtgcaaattgaactacaagggcagaaaactacgaccatgaatattcctgcttggcagcgtcaaatgacctatattccgcaggagccatacgtttttactaagagcttgcgtgaaaatattgctttttataatccgcaggcaagtgatgatgaaattaagcaggcgattcatatcatgggtctggatgccttgttaaatgatttgcctaacggacttgatacggtgattggccgcggtaagcgtgtcttgtctggaggtcagtcacaaagaattgccttagcgagagcatttttggatcctaagcgaaaaattatgatcttcgatgagccgactgctcacttagatatcgaaacagaaattgacttaaagaagcgaatgatgccattaatgcaaaataaactggtcttctttgcgactcacagactgcattggttaaaagaaatggattacattttggtaatggatcacggtcaattggttgagcaaggaagttatgagcaattgcagcaaaatcaaggctacttctgcaagttaatggcaggaatgagaggtgaaaacaatgatcaataagattccggttttaagagcattaaaaaatgatcgttgggttcgcccatatttggaaaaatatcgtaaaacgttgattttggcgattgcactgggcattttaactttcgtctgtggcgggggcttgatgttctgtgctggctatttaatcagccgttcagcagctaaacctgaaaatattttgttaatctatgtgccaattgtcttaactagagcatttgggattacgcggccagctgtccgttattttgagcggctggttagtcacaattgggtgctcaaaatgacctccaaatttagacaacagctttatgactcattggagcgcgatgcgactatttttaatagtaagtatcagctaggaaatattctgggacttttgtctgatgatgtcagccatattcaaaacttttacctaagaacgatctttccaatgtttgtagcttggggcttgtatgcaattatcgtaattggcttaggcatcatttccccactgatgggcatttggatgttgatcctgtttttcttgattatttttgctattcctatttggtcagtcttaatcaatggtgcgcggcaaagctatgaaaaaacggttcaagacaagctctacgttgatttgactgataatgtgatgggagtagatgactggattttgtctggccgcagcaaagaatacttggccttgcacgtcaatgatcaagataaatttttgcaaatcaacgcgaagatgaaaaaatttgatcgctggcgcgactttgttttacaaatcttctgggtgttggtaattgtgagcctagtaatttggggtgctgccagatttggcgggcgttcaacttattatactaattggattgcggcatttgctttggcattattcccgactgttgaggcttttgccagtttgccgactgctgctcaagagacgaatatctacaaagattcgcttaagcgtttgaataatttgccagctcctgatcggactaagcataaaccaatcaaattaaccgcaccgtttaatttagtattaactgatgtgcattatgtctaccctcaaactaataaagaggttttgcatgggatcaacttaaatatccatgatggtgaaaagattgctattttgggtcgtagtggtgcgggtaaaagtactttagctgccttgctcagaggtgatcgggtaccagctaaaggacacgtaactttaaatggaattgataccagcaagtttggcgatcaaatgtccaattactttagcatcatcaatcaaacgccatatttgttcaataccacgattgccaataatttgcggctaggtaatgaagatgccacagatgagcagctatgggacgttttgcgccgagtaggtttggccgagatggtgcaaaaattaacggatggccttgatactaaggtggatgaggcaggattacgcttttcaggtggtgaacgccatcgtttagccttagcgcgaatcttactgaagaatacgccaattgtcttacttgatgagccaacagttggcttggatccaattacggagcaagctgtaattaatatgtttattaaggaattatccggtaaaactttaatttggattacacaccacttgcaaggaattgatcagatggatcaagtaatttttattgaagatggacaaattaatatgcagggtacaccggaaaaattatggcagacagagccgcgttatcgtgaattgaaaaaggctgatttaggattatagaggttcattatgctaacgaataaagtgccagaacaagatgtgcatgacctatttactagggtcgcacctaagtatgatttgatgaataatattgttagtttagggattcaaaagagttggcgtaagaaatttttacggcagttagatttaaataaaaattctatttgcttagatttgtgttgtggtagcgctgattcaactattgatttgactaaaaaagctaaattagtgactggtctagattttaaccaggagatgctgaagattgcccaaaaaaagattcgtcaaaagcagctgcagtccaagataaagttgattgcaggggatgcaatgaatttaccttttgcggccaatagctttgattgtgtaactatttgttttggcctgcgtaatgtccctgacgctgttaagacgattcaggaaagctaccgcgtacttaagccgggcggacaatttgctgttttagaaatgtctcagcccactaatgcattagttaaattgggctggcaagcttattttaaaatttttccgtattttgctaagttgacacacggtaatatcaaggactaccagtatttgtcaaaaacaagtaaagaatttctctcggctgagcaattaaaaaagctacttgagcaaaatggttttactcgagtagcggttactaagttaacttacggtgcaggtgcgattcatttgggacgcaaagactaaagcgttcgattgactaatttacgcgtcatctttttgagcaagacggtcgcattagtttgcggcagttgggctaagttagctaatgcccgattagtgtattgttcagctaaggcatgagtttcttcaatgactgagctgtttagcaaaatcttttggatttgttcgatatcgtttttgctcatttgtcgctttttttcaagtagcggtactaattgctctcgtaattcctttttgctaagagctagcagaataggtagagagtagacgccggtagtcaaatcttctagcgttggcttgtttagctgcttgccgccagtgtaatcaagaatgtcgtcaacaatttgaaaagcaatgcctaaattttcaccaaaggaggctaaagcttgagtagtttgctcatctccattgccaaaatggcttccttcttcggcagctaaacgaaaaagtgcagctgtctttcctttaacattagttaagtagtcgttgaaatcttggcttaggttaaaacgttcagccatttggcctaattcaccagcaagtaaatggtgcattgtgtgagcatttttgatcatgtaatcttgttcggaaatggcgttcaaaattaggtcaaaaaagtgcgtaaaaagcaagtcgccagcgtaaactgcggtgtctttgccaaaacgggcttggatgctaattttaccgcggcgctcgtcagaatcgtcaatgatatcatcatgaattaatgaggccatatgcaaaatttcgattgatgaggcaagttgaataatttgttttgatacagtttcttttttgctagcaatttgagctgacaaaattagtaaactaggccgtaaatatttaccaccgttactagccatttcaaggagtgcatcttgcaagtctgaatatggagtgcggatggttgcctgaattaattgattaacttcttcaagcggtttacgaataagtggatatttttgccaaggttgagagttattcatgatagatttccttataatagagttaacagaatagtgatcctttgaaaggatgtggatcgatgtcattaagtgtatttttagaattaattgagattaaagcaaaaaccgctagtgtcattccctttttcttagggatgtgctacagcgtgtattattatcaccaagttaactggggatttgccctagtcttcttcattgcaatgctactatttaacatggtagtagatatgtttgataactactgtgattattatcacgcagatagcaagaattaccaagagaagactaacattatcgggcgagaaaatatttcacctaatttagttctgggattaattatttcctttagtcttattgcaattttattaggtttgtatctagtcgctaaagtaggcttgcctgtattgtggatgggcttgttctgttttatggttggttatttatattcatttggtccgcatcctatttccagcttgccactaggtgaattgttctctggtttcacaatgggcttcatgattgtactgctcagtgtttatatcaatagttttcaagcttttgattggaactggatcacaatcggtcgtatcttcttattagctttagctgataaattatggatttctaatttaatgctagctaataacttatgcgatgcccaagaggacgaggataatcaccgcaccacaattattcactttattggtaaaaaaggtggcttgattgcttttagtatcaaaaatgttttagcatttttagtaatcttcctcctaccgtttttgggaattgctcctaagacggtttggttaacagtaataattgtaccgttcgtttataagcagaacaagatcttaattggtaaacaagttaagacagagacatttatcacaggagtaaaaacgttgctagttggttcactgacttacttaataacttactttttaggaattctattttagagaggttgaaaattatgaaaacagttgtagttttaggtgctggttttgccggcttgaaaacagttgtcgctttgcaaaagaagttgcgtgaacaagttaagattatcttagttgaccgtaatccataccactacgaaacaattcgcttatatgaagtggctactggtgaaattccctacactgggatgtcatatgaaattaatgatgtaattaatccgaagatgactactgtgattacggatgaagttgaaaaagttaatattgctgataaaacagttgagttaaaggatcatgctccacttaaatatgactattgtgttgttggcttaggctttaccttgagcaatatgggcattaaaggtgtaaccgaaaatgctttgccaatgagcaatgtaaaacaagctgaagctattcgcgaccacctttatgtcgaaatgaaagcttatcgccaagaccatgattctaaacacctgtcagtagtaatttgtggggcaggttttcaagcaattgaattaggaaatgccattgcaaaggttcgcccagaactagctcaaatggctggcgcccaaccagatgaaattaccatcagaatgattgatggttcgccacgtcttttgccaatgttccaaggtaaattgcttgattacgctttaaacacaattaagaaaaataaagtcgaaattattaagccagcttatgttaatgaagtaacctctacctcggttttgtataaaatggctaatgaaaaagacaatgctgagctgcaagaaattaaggcaggtactagaatctggatgatgggctttagtggcagtccagtaattgaggcatctggatttaagaaccgtcgtggtcgggtcatggttggtgatcatttaaccgcgccagaaagtgatgatatctacgtcttaggcgatgtttcaagcgtcatggttcctggtaagaaatggccatatcctaacactggtcaattggctctttcaatggctaactacgctgcaaaagatattaagagcagaattatgggtcaaactagaccggataaatatgcttaccatgacttaggtgtagtagttaacttgggtaattcagaagccgcaggattggcaatggggcatgcttttaaaggatactttgcagcaactcttaagaagattaccattgataagtcggttcttgaaactggtggtattaaagaaacaatggcgattggtcaatttgacttctatcactaaaattgaaaataaaagagaataaaaaatcacttcagtttgatttgatatgaaccccaaatttgggacatattattgaactgctttatttaaaaccatatttcgatattctatcggagtatggttttttagtactgttttaattctttcatgattgtagtaatgaatgtattaggactaaagtgtgaagttgcgccattttatgtcacaccaagaagacctgctattcaccacactatgggtggcttagtaatcgacactaaggctcatgttttaaataaggacggtcaaatcatcgctggtctttattcagcgggtgaaaatgctggtggtatccatgccggtaaccgtttaggaggaaattctttagcagatatctttacctttggtagaattgctgccaatactgcttatgaggataagcatgttaccgatgttattactggcgcttcgcagaaataaagatagagtataaaaaaatacagatatatacgcatggtgctagttaaatcgttttagttaataaaaaagtccaatcttgttagactcgacttgtaaatagtaataatagaaaagagtctgatctgattgaactgtcttaagcttaagcgttttagccaccatttacaagttagttttaaagatttagtgataatttgtcggcactggtatcgtttgtatgcaccggctgagtttactcatcggcgaaatattgatcaaattaaaactacggacagtctgattttggctttacttatctggcaagctaagacaggaattgaatcacaaagaagattctgtgaatgtttcaattgtttatcacactcacgttttaatcggcgttcacgtcagctattgcaattgatttatcagatacggcaagaaatgaataaaaaggttgacctgaatggacatttcttgatcattgacagctttccggtacctgtttgccaaccaattcgcaactatcgtgctaaaatttttcgcggttatgccaacattggttataaggccaccaagaaaatttacttctatggtttcaaagttcatgccattgttagcgatgacggttacattcttgattatgtcgtaacaaaagcatcagttcatgatgccaaggagacagttgaactgctggaaaatgcccatccatctaattactatcttcttggcgacgaaggctatttaggcaaagaactgcatcaacagctaaaacaaatgggttatgaactttggacaccatatcgtaaaaatatgacaggagctaaaaagcacaatgatcatcaattgatggctattcgcagaacaattgaaagcgacttttcgcttctgacctattacaatgccgagaacaatcgagcacgtagtctgataggctttcaaagccggttggaaattgcaattttagcttataatttggcttattgtctagaaagatttaactagcaccacgcgtagatatatcaatttaaatattggtatgtctgtatttctatttggagtcattttttccttaccttcgaataaaaaaccatgatttctaattcttactaacaaaaataatagtaacttttctaacttcccaaaaaattttgcgacttttttgcgtaataaataatagaggataaatatcctcaaattatttaaggaggactttgcatgagcaaagagaaagaactaaatgtgtctgaagcattaggttttacggatgatttgatgtttcagaatgttatgagagatccagagatctatcgtatgtccttgaatgaggttctaccacatttggacattcaagatatcactgtatgcacgcaagaaaggattgcttttaaccaagaagagaaagtttcgattcttgatgtcctgattacggatagcagaggcaggcgttacaatgtggaaatgcaggtcgcgcataaagcagacatggataaacgagccaggcaatacctgttcaagatgatggaagatggctttttacgacgaaaacaagaatatggcgagctgcacgctgcatatgtaatttttattctgccgtttgatcccaaaggaaaaggcttgaagcgatatacttttgtttatactgctaaggaagacccatcagttgaattaaatgacgattctgcgataatatatttaaacacaaagggaacaaaaggcaagatcagacctgagcttgatgacctttatcgcatgattgaaggcaagccaacttcaaatggaaaactcgtcagtcgaattaaaaagtcgatgaacaattatcgtagaaccgaagaatggaggcaacacgtcatgaacacagaagaagtagcagaagcagcaaagcagcttggcatggaagaaggcatacatgaggcaactgttgcagcaatccataaaacgattaacatgcttagaaggatgaagcgcagtcccaagcaaatcttgcaagaattagaacaagattatggcaatgaattttctgaagaagaactagcagactttgtgaaaaacgcctagtcgataagatataatgatagctgtgaagctatcattttttagataacgggggcttgatcatgaataatcctgaagaattacaacattttttagatgttctgctaaaagagagtaactttaccagagcagctaaagaattatatatttcccagccttatttaacgcagctaattggacgaattgagaaaaaattaggcactaagatcatcaaccgagatgagagaccctatacgttaactcctgcaggtctaatttactatcaatatttggagaatgtttcatataataagcagcaattagggcgcaagctggaggcatatactcatcctgaccaacagataattaaaatcggcattttggagagcttaggtacatatttattgccagaaattttgccgcaatttttgcaagaaaaccccaacgtcaagattcagctatttgaaaatttccccagagaaaatgaaagaagactgcttaatggcgagctggattgttatattggtcagacgccagaagcacttgactcgagtttagatgtggttgcgggtggcgaggaacgctattacgtagtgatttcgccagcctcaccatattaccaagcaggaaagtttatcttaaattcggatgaacttgatctaaaagaggtactgcaggagcctttagtgttgagttcacctggttcagctatccggcatcaagttaatggcttatttcagagattaagactcgaaaaaaatattgtgatggagtctaatagtattattactgcaactaacttggcaattcacggcgtgggtattaccatttcttcggcaagtattatcagaagaatggaacaaacgccaattaacttgttgccactagatcgaaagttaatggatgttgtctttttcattactagcaaaagcggggaaaagtcgccagcgttagaaaacctaatttcaatttttcaaaagacgcatttacaagcaaaaataggataaagaaaaaggcatcatgcgatgccttttaaattgctttgatttctattgttttcgtttcatgtcgatcatcttcggctcaatgtagaagtgatagaggaaggaataaccaagcagtacaaaggtaattccttcaatccaaccgccgaatacatcagatggatagtgcacgtggacgaaaattctggtgtaaccaatcatcagtgggaataaagcccaaataataatcaataaagtcttccagaatttgcttctcactaaaagaatggttaggataatcaaaacaccaaatagcgccgcgctaccaactgagtgccccgatggaaaactataaccatccgcataaactaagtgcttgaccgttggacgctgccgcattgctgcgtgtttgataatccaattatagccattagcacagatcatgacaccagcggtaaaccaagcgtatgcatattgcttaaagaccagtaaaactatgaaaacaatgattgtttcaattgtgatcacgcttgtattgccgagattagtaaaatctttagcaaaagcgacattagctggattattgttgcaaacaatgttgaccacagcattatcaaaattgtgaataaattgtgagccggatgaaaccagtgcggcccagacagcataaataaccacgaagcagataccaggtattaaggtgtccttaggtggtcgtttcgtattaatcaaaaaagtactcccctcttgaaatttatagcatttgtggtaaattataatcattatctataagaaaataaaggtcgagaagtagtaacaaggatatttttttcagagagagactggttggtgcgaagtcttagaataaaattgtgaactcgtctcttaataaaacctagcgttgccatccgcgttaaggagcaattaagtgtcacaattttgtgaaacttaggtggtaccgcgatgattcgtcctatgattttttcatagggcgttttttgatagtaaaggagagtttatcttgtataaccacaaagtagttgaaaagaaatggcaagattattggtcaaagcatgatacctttaagacaggtactgaccctgataagaagaattattatgcattggacatgttcccattcccatctggtaagggacttcacgtaggtcacccagagggctataccgcaactgatattgttgcaagaatgaagcgtgcacaaggctataatgtgcttcacccaatgggctgggatgcatttggtttaccaactgaacaatatgcattgaagactggtgaagatccagaagttgttactaagaacaacattgctaactttaagcgtcaattgaacaagttgggcttctcatatgattgggaccgtgaagtaaccacttcagatccaaattactacaagtggacgcaatgggtttttgaacaaatgtataaaaagggcttggcatatgaagctgaagttcctgttaactggtcaccagacttaggtactgttgtggctaatgaagaagttatcgatggtaaaactgaacgtggtggctacccagtatatcgtaagaatatgcgtcaatggatgcttaagatgactgcatatgccgatcgcttattagaagaccttgatgatttggattggccagaacccgttaaggaaatgcagcgtaactggattggtcgttctgaaggtgcgcaagttactttcaaggtaaaagacagcgacaagacttttgatgtctttactactcgtcctgatactttatttggtgttagctatacagttcttgcaccagaaagcaagcttgttcaagaaattaccacacctgaacaaaaagaagcagttgatgcttacattaagaaaattgaatctaagtctgatcttgaaagaactgatttgaacaaagataaaactggtgtcttcactggtgcctatgcaattaacccagttaatggcaaggaagtgccagtttggatttctgactacgttttagctagctacggcactggtgcagttatggctgttccagctcatgatgatcgtgactatgcttttgctactaagtttggtttgccagttaacccagttattgaaggtggcgatattgaaaaggaagccttcacaggtaatggcaagcacttcaattctgagttcttagacggcttggataatgaagaagctaaaaagcgcatgattgaatggcttgaagaccataactgtggtaagaagaaggttaactacaagttgcgtgactgggacttcagccgtcaacgttactggggtgaaccaattccagttattcactgggaagatggaaccacttcattagttccggaagatcaattaccacttcgcttgccacatgcaactgacattaagccatctggtaccccggaaagtccacttgctgacttgactgactgggtaaatgttgttgacgaaaacggtagaaaaggtaagcgtgaaaccaacacgatgcctaactgggctggttctagctggtactacttgcgttacgttgatccacataatgataaggaattagctgactacgatttgcttaaaaagtggcttccagttgatctttacatcggtggtgcggaacacgctgtgcgtcaccttctttatgcaagattctggcacaaggttctttacgatttgggtgttgtgccaactaaggaaccattccagaagctttacaaccaaggcttaatcttgaagaatcacgaaaagatgtctaagtctaagggtaatgtagttaaccctgatgaggtgatcgatgaatatggtgcagattcacttagaatgtacgaaatgttcatgggtccacttgatgcatcaattgactgggatgacaatggtcctgcttcaactaagaagttcttggaccgtgtgtggcgcctctttgtaaacgatcttgatttgaaggccattccacaagaaagaatcgttgataagaatgatggtgaacttgacaaggtttatgcagaaacagtcaagaaggtaactgaagactttgaatcattacactttaacactgcaattagtcaaatgatggtcttcatgaatgctgctcaaaaggctaagaccattccacgggaatacgcagaaggctttgttaagcttttagctccagtggctccacatatgatggaagaaatttggcaagtctttggtcatgatgaatcaattacttacgctaagtggccaacttatgatccagctaagttagttgagtcaactgtagaaattatggttcaagttaacggtaagcttcgtggtaagttccaagctcctaaagacgctgcaaaagatgacttgcaaaagcaagcaatggaaattgaacacgtaaagaagttcttggaaggcaaggacgttaagaaagttatcgttgtgccaaacaagattgtcaatattgttgctaaataagttagattttcctaaaaaataataagaatacttattatttagatttattgaattgattagttgagacttttagagactgtaaaatagtttgtgtaaggatgaatgattccttaaatttatttctttaaacattagaaaaaggagttcctttctcgtatgattggtttgaacaaaaaaacacatacagaaagaagaactccttcatgaatgattttaccaaagattttgctcaagctctattcaatccagacaaaataaatgatttattgcgcaaagagctacaacaggctgttaataacttgttagaagctgaattgaccgcctttctgggctatgatccctatgccagaaatggctggaatactggcaactctagaaatggtgcttatttccgcaaagttgatacgcaatttggcccaattgaagtgcaagtgccccgggatcgcaacggtcaatttcatcagcacacgctgcctgactacaagcagcactcggatatcttggaaagcatgattatcaagctttactccaagggcgtgaccaccagggaaatagccgatctaattgaaaagatgtatggcagccattacagtccagctcaggtatcaaatatttccaagcagatgattccaaaggttgaggcttaccacaaacgcaagctaagcgacaagtttttctgcgtctatttggatgcgacataccttcctttgcgccgagaaacatttgagcgtgaagcagtctatattgccattggcatcaagcctaatgggcacaaggaggtcattgactactgcattgcacctagcgagaacattgaagtctggacagatatgcttcaaaacatgaaatcccgaggcttaaagcaagttgagctttttctttctgatggtgttgttggcatgaaaacagccttggccaggacttatcctaaagctcattttcaacgctgtttggttcatgtcatgcgcaatatctgcgctaaagtacgcgtcgacgatcgtgaaaagatcatgaacgaattcaaacaggtgcatcaacagacaaacaaagaagaagccacagctgtcctgcatgacttctataccaaatggggcaaggtttacagccatgttatcagaagcttgaaagacatagaaccagatctgctggtcttttataactatcccaagcagatcagagcttcaatttattcgactaacatgattgaatcatttaacaatgtgatcaagcgcaaagctaagcctaaggcagagtttccaactgaacagtcgcttgatgcttttattggcattcaggcaatgagctacaatgaccgttatttcaatcgaattcataaaggctttggtcaggttcaggacaccttagaatcctactttgattaaataaataattaaaaaatcaatttacgagaaagaactatttacacaaaagatttgacagtttcgacttttattgggaaaattttaatggaagaaaataacttaaatagcaaagatacacaaaatacttttctaaaaggttccgcatggatgacctttggctcaattgcctcgagaattttgggtgctttgtatattattccgtggtatgcctggatgggctcctacggcaatattgccaatgctttgactgcgcgtagttataacatttatacaatttttatcttaatctcgacagccggaattccaggagcaattgctaagcaggtagctaagtataatgcactaaacgaatatgggattggccgcaaattatttcgcaaaggcttaattttaatgaccgttttgggtattgtctcagctgcgatcatgtattttgcttcgccgcttttagcttcaaatgggagtcaaagtgatccaagacaggttgcagttatgcgtagcttgtcttatgcgattttaattattccaattttgagtatcatgcgaggctatttccaaggttatgccgatatgatgccaagtgcgatgtcacagtttgttgaacagtttgcccgggtagtctggatgttgctaacggcgtttgtaattatgaaactgcaacatggttcatatgttcatgcagttattcagtcaaacttagcggctgcagttggtgctttatttggaattggcttattaatttggtttttgttttctagaagaaaacaactagattatttggttgcccattctaataatcgcttgcgggtctcaacgactgaattatttggtgaaattattgcacaagcaattcctttcattattattgattcaggaattaccttattttcattggttgaccaatataccttccacccgatgattgccagtctagttcatgctagttcagatacaattgaggactggtatgccttgtttggtttgaatgctaataagttaatcatgattattgtttcgctggccagtgcaatggcggtaaccgcgattccacttttatcagcggcgcatactaggggagactataagagcatttcaaagcagattgctaatacgatggacctatttttatttgtaatgattccagctgcttttgggatggcagccatcagtaggccaatttatacagttttctatggtccagatctattggggagcaacgtactatatctgtcgtcatttaccgcgattagtttaggattatttacggtgctgatggcgattttgcaaggtctttcgggaaatggactggctatcaagtacctggttttaggattgattttaaaagggatcctgcaatatccaatgattttcctatttaaggtatacggtccgctggttgctactaatttaggtttattaattattgtggcactttctttaaaacatttggaagtgcagtatgattttaatttgaatcgaactagtagaaggctggctggagttacagcattttcagttggcatgttccttgtggttaaattatgtgaaatgggactaggcaagtttctcaatcctgatcatagatttaatgcattggtgctagtgattgtagctgtaggtgctggggttgtcttttatggcttggtgacattgaagacagggttagtccaaagcgtcttaggtagtaaggtagaaagtattttagttagactacatatggataaataaaagaaaattgcggctctttgtcaaatcttactgataaggtgtcaagtctaatttttcctggtagttgagtaaatttttggccgggggatggcttacttgagtaagtttttgtgcaatttctaagtgaatcaaccctaattgtcaaaaaactgccactccctcttgcaaagacgataattagtgttattatataatgcataagaaacgcaagaaatgtgtataaaaacaattatttttagcaaaggaggcaaaaagcatgattaatctgactgttaatacaatcaggcttagcggtgtcgctgcaagagcaaaccgcgtcatgttttaactgtcctttagacaaagtgaatcaaagataatttaacagcacagtattaagtacacccggtttatcggcggcatcgttaactgaagattttttgttatgcgtgttagctaatgaggtattaagatgaacaagggtaagactttaatgactggtgctgttatttttatgtgcgggagcatgctggcggcctgcggcaagagccaaggagcatctgtcaagcagaatttaaactggatgaccagtgcgaaaatcatcaccatggacccatccaaagccaccgacaccacgtccttccagcagattgaaaatacgactgaagggctctaccagctgggcaaagacagcaagccggttaaggtactggtcaagaagacgactgtcagcaaagacggtctgacctggacttttgaccttaagaaggggactaaatggtctaatggcgaaaccgtaactgccaaggactttgtctattcctggaagcggacggtgaaccccaagacagctagccaatacagctacattttctctgggattaaaaatgccgaccagatcgttgctggtaaaaagaaggccgatacgctgggcgtgaaagccgctggcaaatacaagctgcaggttagtctggaacataagattccatacttcaagcttttgatggccttctcagtctttttcccagaaaaccagaccgcagttgaaaagtatggctcaaagtacggtacgtcatcaaaaacgaccgtttataacgggccattcttgcaaaagggctggacgggctccaacttgtcctggaccatgttcaagaacaagaactactggaacgccaaagccgttaagctgcaaagcatccactttgccgtggaaaaatctccgtcaacggcctactacctctaccaagatggcaagctggacacggcaagcctgagctcacaagcctccaagaacctgcaaaagtcaccagactatgttgtaagaaagaccaacgggacgacttacttccaatttaacctgaaaatgaagaagttccagagcaccaagatgcgtcaagccatctccatggccctagacagaaacgtcttagccaagaccttgggcggcggctacacgggctctaagaactttacggcagctggcatgaccaaggtgggtgacaaggattttaccgacctctctcaaaccaaggaaagcttgctagtaacgggccaccacaagcagctggcccaaagctactttaaggaaaggttgaaggaacttggcttaaagaagctgtcctttacggtgattacggcacacgtccaagtccatcggcgaatacttccagagtgctcttgaatcaacttttggcaagcaaatcgacgtcaaggtgcaaagcctgccaaccaagtcccaatttgccaagatggactctggtaactttgaagccacgatcagcggctggaatgcggactttgccgaccaaatttccttcctggactgcatgacctctactaatggctacaactcaggcaagtggatgaagctgctggcaaaggctgaaaacaccttgctggttgatcagcggctcttactacttcgaacacgtctacattgccaagtaagccagtaaaaaatgtattatcatgctaggtattatgtagtagaaagtgaagaataaagcgtaaattgctataattaagatagaaataagggaaaatcttaattagtgaaggagcgaaagataatgaaagactcaaattcaccaatttacaacatttggatggtggttctgctggttgccgcatatgtctggccaatctttggcttagcaccagccatctacctctttatcaagcgcaaggatgagaatctggtccctttgaagaattggattactctagccttgatctggcagattgttttgtggctgctcttgattttggttgtcgtctccttctgggtcggcgcctttgcggtcaaccacggttaactaaataactaattgaatagctagataaaagtcagtggatgccactggctttttgtctgcttaagcaaatgtcataactatatcactatttatagccttgaatagatttaatcggttacataatgcatcacgcaggtgatatctcacaaaaaattaacaaaagcatcaggttcaaagattgttaagccgatgttaaatagaactagcaagggtgaaagcggtacatttttttctttgttaagctaatgtaaactaagaaaaataacgttagaatattaaccgattttcgaaaaatggtaaagatttttccaaaatccggccagaatttaaacaaagttaagtattttactttgatttaacatttccccctgaatgtatttaacctccattaattactatttacttagtaagaattcaaggaggataattatgttaggcaagaaaactagagtagtggttatcgcacttgctctactggctatagtcgtcggctgcgttgttggcagttcaaaggcagacaccaagggtgtctctgggactgttaacgctgcggggtcttcagccctgttgccgctagtccaaagcgcagctaaatcattcatggatgaaaatccagacagcgtgatcaacaccaacggtggtgggtcaggccaaggtttacaacaagtctcagatggaaccatcgacatcggtgactctgacttgttcgcagaagaaaaattagacaagaagtccgcatccaagctggttgaccaccaagtggccatcaccgcgattgccccaatcgtcaacaaggacgccggggttaagagcttaaccacccagcaattgatcgatgtttacactggcaaggttaccaactggaaccaagttggcggcaatgactgcaagattgttttgatctcacgtcctgcttcttcaggtacccgggcaacttttgaacaatatgctttaaacaagactgccagtcgttcaaaccaatcactggaaactgacgactccggtactttgatccaaatgattcaaagcgttgaaggggctgtcggctacgttgccttatcatacttgactggtaacccagacgtaactgcagttgccatcaacggcgttaagccaactctggacaacgtttacaacggctcatacaaggtttggaactacgagcacatgtacaccaagggtcaaccaaagaaggctgctgttaaggcctttttaaagaagatgttaagtaaagaatacgaatcaaaggttgaaggcatgggctacggtgttgcttctaagctttcagacaaggctaagaaagaacacaagtaaaaggagagtgatttttcatggacaaggtagttcaaaaagccatcgctagcgataagcgctggcgggcagtatacattgcttgcgggctcttgattgttgctttgacgctcttgatgggggcattcctgctctaccaaggtagtcaaacctttatcaaggctcaccacagcatctgggaattcctgtttaccagcgactgggcaccgcttgacaagaccggcctgtttggcgggaaagtcggtgcagcagtttacatcgtaggttctcttgaaacctgtttgctggccctggttatctgcttgccatttgctatcggctcagcagtttacatgacggaaatctcaccaaagatcggtgaaaagtacttccgtccagctacggaaatctacgtttcaattccatccgttgtttatggttggtttgggatgaccaagctggttccattgattaaaaatattttccatccagccatgggtgggtactcagttttggccgcatccattgttttggccatcatgatcttcccaaccatcaccgcggtttccgctgacgccattaagtcagtgccaatgagctaccgtgaaggtgcttacggtttaggcgcaacccgctggcaagtaatcggcaaagttgttttgccagcagcttcaggcggcatcttgaccggggtgatccttggcttggccagagcgatcggtgaagccttagccgtagccatggttatcggtaagactcgctcatttgcggcaaaccttttgtcaccaaccagcaacttgacgagtgccatcgcagccgacatgggtaacactgcccaaggcggggaatacaacctggctctgtggaccatggcgctgctcttgttcatcatctcaattgtcttgattgtgctcattcacaaactggctaacggaaagaaggataaataatgaaccgtgctaagaaaaaagatcggtttatgaccggcgtcttttacgccatcggctggctgatgctagcattcttgctgtatttgacatttaccattatctttgatggcttgaagggctttagcccagacttcttaggggctgccggcaacgggatcttcaaccaattctttaacactctttacttagttttcctttcgctcttagtttccgtgccaatcgggatcggggctggggtttacctggctgaatacgccaaggaaggcaagctcttgaccatgctggaagtaagtatcgaatcactttcttctctgccatccatcgtaatcggtttgttcggctacctggccttcatcatgtggacgggaatgagctggaacatcgtggccggggccttgacgatctcaattttgtcaattcctttgatcactactgaaaccaacaatgcaattcgtgccttgccaattgaatacaaggaaggttctctaggtttaggtgcaaccaagtcagaaaccattagaaaagtcttgattccagctgctatgccgcaaatcttgactggggtcatcatggccgctgggcgtgggtttggtgaagccgccgctttgctgtacacgtctggtcaatccacttacatcaactggcacaacttctggaagattacttcacctacttcacctttgaatccattcagaagtggtgaaactctttcactgcacatctgggtcatgagaactgaaggggctttgaaccctaaggcaacccaaattgccaactttacttcagctgttttagtagtactcgcactgctctttactttagttacctgccgcatttcagacaagatgcgtaagcgcaataacggaggaaattaataatggaagacaaaattactatcgaaaacttgaacctttactacagtgatttccacgccttgcatgaccttaacatgcacattccaaagaatgaaatcacggctttcatcgggccatctggttgtggtaagtctactttgcttcgctgcttgaaccggatgaacgacctggttgaaggctgccggattgacggttcagttaagttagatggtaccgacatttatggcaatgaccttgacgtcactgttttgagacagagagtcggcatggtcttccaaagaccaaatccattcccaatgagcgtttacgacaacgttgcttacggtcccaagatccacggcgtaaccgacaagcaagaacttgacgaaatcgttgaaacctcattaaagcaagctgctatctgggatgacttgaaggaccgtttgaacaagtctgctttgggtctgtctggtggtcagcaacaacgtctttgcatcgctcgtgccttggctgttaagccagaagtcttgctgatggacgaaccaaccagtgcccttgacccaatttcaacttcaaagattgaagaattggctctgcaactgaagaaggactacaccatcgttatcgttacccacaacatgcaacaagccgtgagaatttctgacaagactggcttcttcttgctgggtgacctggtagaattcggtgaaactgaccaactcttctccatgcctaaggatgaaagaactgaaagatacattactggtcgtttcggttaaagaccagtaataattagatagagtaagaaaggcagaaacaatgactagatcaagatttgatgaagaattggacaacttgcaaaagtccatggaagacatcggcaagctgtgccaggaagccattttggaagcaaccaacaccttgtttacgggcgactaccatgaagctgaagactcagtcaacttgcaccgccgcatccacaagagcgaacggaaaattgaagacagctgcttgcgcctgttgatggagcagcagccagttgcgactgacttgcgggtgatcagttcttctttgaaggccgtttacgacctggaaagaattggggaaatctctgctgatattgcagaactcgtgttaaatgaacacctgtccatcgccaatgaccagctgaaccttaagtccatggtgcaaacctcaaccagcatggttgatgatgccgtaaccgccttgtccaccaagaatctggaactggcgcaagcggttatcgaccgcgacgacattgttgacgatgactttgaccatgcccgagaaatcctgatcaacaacttcagcaaggatggcaatccagaatacctgatcaacctgatgatggttgccaagtacttggaaaagatcggtgaccacgcggtcaacgttgctaagtggaccaagtttgtggcaactggcaaggccggaagataagtcttggaaagtttgctaaattaatattcttcctgatctatctgcatagcaaatgtttctaagctataattagagtagctatttgcagatagattagggagaatttttttatgactgaaatatggtgtgtggaagacgacgaaagcattcgcaaaatcgaaatgtatacgctggagtcgatgaactttaaggtgcgtggctttgaagacgggacgacttttgtcaaggccctggcggaaaagcatccagatctggtcatcttggacctgatgctgccagatgaagatgggagcgatattttgaaaaagctccgtggcaactcgtcaactgaagaattgccggtgatcatcgctagtgctaagacagccgaatatgacaaggtgaagaacctggattctggggctgacgattacttgaccaagccttttggcatgatggaaatggtctcccgggtcaaggcggtcctgcgccggaccaaccacaagaaagaagacaagatcgagaaagacgggatcaagatcctgctcaagcggcatgaggtttatgtcgatggtcaggaaatcgagctgaccttgaaagagtacggcctcttgaagctcttgatcacccatccagggaccgttttttcccgagaagaaattatggatcaaattttgaaaacgggcttttacggtgaaacgcgcacggtggacgttcacgtaagaaccttgagacaaacattgagtgaggctggtagccatatcgaaacggtgcgcggggtcggttatcgctaccatgaagggaattaatgtttaaaaaaatatttcgggcagtctttttatcaacggcagtcatgctggtctgctcggtggttttgagtgcgctttttttaggcatcgactatgatcacaatgaggtcaacaccttggcttcgcaggccgatttggcagccagcggggtcaacaatgggggaaggaagtacttaacccagctaaaaggagaaaattaccagattacctggatcaatgctaaaggcaaggtactctacgacaacgaggaaaacccagccaagatgggcaaccacgctaagcgcaaagaagttgctgaagccatgaaaaagggcgaagggcaaagcgagcgctacagcacgaccctgtcgacggttacgatgtactatgccaaaaagctgaaagacggcggcgttattcgggtggcggttacgcggaattcgatctggatgaccatcttgcaattgctgacgctgatgctgatcatcttgctgatcgccgtgattgcttcttggttcgtagctaagatgatctcgcagtccatcgtcaagccgctgaaccagttagacctggaccagccgcttgaaagcaagagctatgaagaaatcaagccgctgttaacccggcttgacagtcaaaacaagcagattgctgaccaaatggagcagctccaccaccgggagaaggagttcaagacggtcaccgatgccatgcaagaaggcctgatcttgatagacctgaacgaccaggtcctcttgtccaatccggcggtagtatcgctcttaggatcaaagtcttctgaagttttgccagatgatgttaaaaagatcatcgatcaagacaagcggaccgtccacaccgaagggatcgtggaaagagaagggcgcaacattcaaattagtgccagtccgattttttcacggaaggtcttaaaagggacttcgatcttggtcgttgacgtcacagaagaataccatgaagagcaggtccggcgcgaattcacggccaatgtgtcccatgaattgaagacgccgctgcagtccatcatggggtcagcggagcttttggaaaacaacctggtcaaggaagacgatcggccagccttttaccggaagatccatgaatcttcagctcagctcttgaccttgatcgatgacattatccggctgtctcacctggacgaaaatccggaatttgaagaggtccggatgaacctgaagagtccggtgaccgaggcgatcgaagccttgcaggcgtcagctgacaagcacgagattgagctgaaggcggctttggccgatacagaaatcaaggccaacttccgcttggtttatgaaattgcctacaacctgatcgacaacgccattcgctacaacaatcctggcggccaggtcaagattgcggtcaaggaagtgcgggggcaagctattttgcgggtttctgacacggggatcgggattccgcttgaagcgcaaaaccgcatctttgaacggttctaccgagtcgacaagtcccacaaccgcaagactggcgggacgggacttggtctgtccatcgtcaagcacgcagtacagcagtgccatgggacgatccgccttgaaagtgaactgggcaagggctcaacctttaccgtggtcttcccagctttaaagcatgaagacaaattatacagccaaaattgcttatttgatctatgataaaggtgtcgaaagaaaataagagctctatttaaataacatagacataatcatgggctaagtgtatataaagtgtaatttagaactatacaatatatacgtaaaatcttatgattaaaggtgaacagatattatagccactttttttaggattcgattaatgtaaaaattacacaatgaattaataaaaagcgccatataataagcaaaaaaagtcatttaaataactaaaataaactgagacctaaaagttgagactgtaaaatagtttgtgtaaggatgaatgattccttaaatttatttctttaaacattagaaaaaggagttcctttctcgtatgattggtttgaacaaaaaaaacacatacagaaagaagaactccttcatgaatgattttaccaaagattttgctcaagctctattcaatccagacaaaataaatgatttattgcgcaaagaactacaacaggctgttaataacttgctagaagctgaattgactgcctttctgggctatgatccctatgccagaaatggctggaatactggcaactctagaaatggtgcttatttccgcaaagttgatacgcaatttggcccaattgaagtgcaagtgcctcgggatcgcaacggtcaatttcatcagcacacgctgcctgactacaagcagcactcggatatcttggaaagcatgattatcaagctttactccaagggcgtgaccaccagggaaatagccgatctaattgaaaagatgtatggcagccattacagtccagctcaggtatcaaatatttccaagcagatgattccaaaggttgaggcttaccacaaacgcaagctaagcgacaagtttttctgcgtctatttggatgcgacataccttcctttgcgccgagaaacgtttgagcgttgagcgtgaagcagtctatattgccattggcattaaacctaatggacataaggaagtcattgactactgcattgctcctagtgagaacattgaagtctggacagagatgcttcaaaacatgaagtccagaggcttgaagcaagttgaactctttctttctgatggtgttgttggcatgaaaacagccttggccaggacttatcctaaagctcattttcaacgctgtttggttcatgtcatgcgcaatatctgcgctaaagtacgcgtcgacgatcgtgaaaagatcatgaacgaattcaaacaggtgcatcaacagacaaacaaagaagaagccacagctgtcctgcatgacttctataccaaatggggcaaggtttacagccatgttatcagaagcttgaaagacatagaaccagatctgctggtcttttataactatcccaagcagatcagagcttcaatttattcgactaacatgattgaatcatttaacaatgtgatcaagcgcaaagctaagcctaaggcagagtttccaactgaacagtcgcttgatgcttttattggtattcaggcaatgagctacaatgaccgttatttcaatcgaattcataaaggctttggtcaggttcaggacaccttagaatcctactttgattaaataaataattaaaaaatcaatttacgagaaagaactatttacacaaaagatttgacagtttctaaaagttagacacttttaggtctttttctacgtaaagtcaagcataataagaagtttggcttcattttttgtttaaatttcaacttaaacatcttttagtgtcgatttatttttttagttagacacgacaaataagcccctaagtgtataattttttacggtaagttgaataaataattaaaaaagcccaagtcctttgaatttggacttgagctcaaacaaaaagaccagtagtctgatgttaagaacaaaaaacacattagaagctggtcttttatgaattcaattgtaactgaaatcgcaaatattataaagtctgaagataattatattaagcgtgaaagaaaaataatctgtttcttcttaaacctgattaaggaaatcatggccttggctttagctaaagttgatgatgaaatgattaccaaggttaaagcacagggctatcagattgataagaagaatgagcgctcaatcaatatggcttttggcgaagttaggtatgtcagaagaagatatgtctgcccaggcaaacaagcaaggtatcccttggatgaattaatgggcttttacaaatacaagcgctacagtattttagcagtcaaaaacatcttagaagtaagcagcgttgccacttatcgcaatactgctctagcagtcaattgcctgtctggctttaatattagccatatgcaggtgggcaatttggtaaaaatggccgggaaaaatattaaagctggccaagaagcagattcaagatatgatgccgcaggcactaagaaaaaggtcccagttttgtatcttgaaggcgatggcgtggtgatcaaaggcactaaaagccggttggaatttcatcgctatcaggtctgtgaaggcattgtcaatataagcaagaaacgcagaaagcgaatcaatgccaaggaatttgtttctttaagccgacttgatgcgctgaacgaagccaaggagtacctggccaatacttatgatctttctgatactgtaattcttagcaacgccgatggcggtgctggatatgccaaaacagacttcgatgacattgtagggctatgcaagcgtcatgagcatttcttggatgtctttcacctaaataagaaaatcaaagaaaggctatattttgcgcctgacctgcaaggcaagctgatttctgctttggaatacaaatacagctatgacaaagttaaaactatcctaaccactgcagaaagccgactaattgatgaattgaataccgagctcaatcatgattatctggggcgcctaaggaattatattgatcgtcattgggacgatattaagccgtttaagaaacgaaaactgactgtgactaaagccattggctgctgcgagagcaaccaccgcaagtatacctaccgtgttaaggggcaaggcaagaaatggtcaaaatctggagcagaaggcatgcttaggatcttaagctgcatcaagaatcgagagctggaattttggcttagcagcgagtttgaagattcagaaataactgtattgactgaacaggaattaaaagcagcggcccgtgacagcttaaagaagcgtcatgaagttcatttaggcatccagcatggcgcattaaccgcacaggtagctggcaatagttatttaagcaagctaagcagaaatttaagtcatataaatatttaagaaattaaggttagactaatggtttaaaggctaccgcaaaaacattgacacttacaataagcccagatccatatctgatttttgggcttagcgttataatgtacttgatcaattaattacgactaaagtctttttgattatgtgtggctacgttgtaatcatatggttgatcattgataatcagggcataaatggttctgattagtttatgaattgaagcaatagctatctttttgaaccctttggtttgagaggatagctttttgctttcataataatctgctatatgacacggatttgtcttagctgcattatcaatttgtccaatagctcgataaagcaacttacgtgcgactgcattgccatgtttagtaatacttaaattagagtccatttctcctgactgatatctgcctggatcaattccgataaaagcattgattttattaggattactaaatctgcgtaaatctcctaactctgctaaaactctgacagcagtggtctgtgcaaagcctggaatgctttctaggttttctaaatcatgattaggcaaagacttcgctaacttaaccattcttgcgattaaattttctctttgatcacttaaattaagcaatctgtgtgcataatactgcacttgctcgacttctatgctagagcaagatacaacttgataagcttgataagctaattcaattaatttatctgcagtccttagagcgtgtttaaaagcaatcccctttaagctcattaaccagttaataagctgttttttatcttctcttcttactaagtcacaatgaggatatcgcacaactatttgccagtaatttttacctttagcagaagaaaataaattttcaatttcaggaaaagtcgattgtagagcttggtgaagtcgatttttagctattaccaagtcacttgtcagctggtcatagaagcggctcaaagcattaagctgcttataagtttgggattcgctttgattaaccggatggcgataaagtctttgaattaaagctaaatgataagcatcagttttatcggtcttgttgtagcgtagccccatattcatctcttttttggctttaagcggattaataacaacatattcatagccgtagtcttcaagaaaagcctgcagtctgcgtgaataaacaccggtagcttcaaaaataatttgcggatgtttagaaaaagcggttaattcatgaagcaattgaataaaaccaggacgattattagtaatggttagttcatttttgctttcaccaattagttcacaaacagtagaagtagacttgcttacatcaattccaaaagtaacttgcataataaaaacctccaaaacttagtagtaaaacgtatttacttaagaaatcagatctaattttctaaactcgacatctagtgtccacattcttcgaagagactattgaaaacttaagtaaaactgccagtttattatgcgacatcaagtgtctaaagacctcagggcatatcgttttaccactactttaattctacaaaagaataaaaatagtgaatcaattatcccgtcggataactaattcactatttagcttagaatgtttactatgtctaaatttaataaagaacaaaaaatagaaatttatcataaatggaaagatgaaaatatctcaatcagtcaattggctaaagcgtacagaatgaatctagctaatttagactatatgcttagattaattgatatgcatggaatagaaattttaactactaaaaaccaaagctattccaaagagtttaagcagcgaactattgaacaagcaatctttggcaataaaccatacttacagctgtctttggaactggggtttaaaagtattggcatgcttaacaattggattagagaatataagaaaaacgggtataatgtcattatcaaacagaaaggacgccctgcccgtgaccaaagaaaagcagaaatctcgcaagaaactggagaaagagatccagcagctgaaagaagaaaacttgcgattgcgtattgtgaacgaatacgtaaaaaaactaagtgccttggaccaagaagatcagaagaaatagctagggtgattacggatctaaggcaagaattcaaagttagtttaaattatgtattagctgcgattgcagagcaccctgagctacctataattgccagaagctcatactacaagattatcaaacgacagcccgtcaagcctaaacggtcaaagcttattgctagaatccatgagatttttaatcatcatcaaggccgctatggatatcgcagagtagctttgcagttaatcagagagggctggaaagttacggagaaaaccgttcgctattggatgcataaattaggtcttaaaggcatcaggcgcaataagcgcaaatattcaagctataaaggtactattggcaaaatagctccaaatttaattcatcgtgatttcttcgcagccctgcctaacacaaaatggtatactgatatcactgaatttcatcttaataatgaaaagctttacttatcgcctattctagacggctgcggtggcgatatagtttcttatactatctccaaacatccagatatggatttagtaatgacaatgcttgacaaggcttttgccaaagaaacagctcttaataactgcatttttcatactgatcagggctgtcagtatcaaagccctcgttatcagcgagctttaaaactccatggtattactcaaagcatgtccagaaagggcaactccatggatgatgggctaatggagaacttctttggcctgctcaaaactgaaatgttctatgatcaagaatacaagtatcataatcttcaagaattaactcaagcaatcgaggaatatatcgaatactataacaacgaaaggataaagagcagattaaaaggcttaaccccgaaagagtatcgaagtcaagcctctattaatccaatattttaattgtctactttttacgtctcagtacaaaaattatagagccggttttttagtactgttttaattctatcatgattgtagtaatgaatgtattccttgattgcttgttctaattcacccatggttttgaatgtcttttcaaagccatagaacatttttcgtttaagaatgccaaagaagccctccattaagccatcatctaatgaatttcctttacgtgacatagactgggaaacaccatgatttttaagccaagcttggaaaacagcgtgctgatattgccagccctgatcagtatgaaaaattaacccattgagtgcaggatgcttttgataagcttgatccagcatgtccattacttgttttagtaccggatgacgatttaatgtataagcaacaatctcttgcgtacatccatccataataggcgacagataaagcttctctccattaaggtgaaattcagtaatatctgagtaccaatgtctatcaggaataattgctttaaaatttcgtttaattaaattgggcttgatttttccaacagtccctttgtagcttgaatatttaaatctgcgtctaattgcaatggcatatagatgcatcttggtcattaatcgtttaacacgtttatgattaactataatgccttcacgtcgcaattgggcagtaattctacgatagccatatctatgcttgtgctcctcaaatatttctttgatccgttccataatcttttcgttttttaaatctttatcatctttagttaaagtgtagtaataattactgcgtgataaatgcggaagatcaggattggagttaatcgtatcaagcacaaacttaacggttacgtggagttcttgccttagttgcgtaaccgcagaaactatctcttgtgctgttggttttcggttcttggggagactaaggcgctcaatttttttacaaattcgttctcgacagtaagtcttaagttcttctgtttgaggtcttttatttgcttctgaagctcttgaatctgtttgtctttgtccttcatgggtaggtctgcctttcttgtgattaatgacattatacccgtcttctttatatttgcgaatccaattgtgaagcataccttggctgggcagtcctaaatccaatgatacctgacgagccgtttcatgatcataaataactcttttgatggctttctctttaaattcaactgagtaatctttatagctattatcaagaatttctatcccatgacgttctattaaggcaatcagataaaacaaatttgtacgatttaccccatattccttagcagctaggttagctgatatattataatttttccaattattgtaaatatcaattttgtcttgtttggataatttagtcataataaaaacctcgaaattcttgtccgaatttcggggttcatatcatttgtttctgtagtgccttttttataaatatcaataaattttaggagtgtaataagattttagaattaattatgttcaactgctgttaacgtaatgactccaattaattcaagtgccaaaaatgtaattccaaggatagtaatcatagtgcccatctccttatctaggagataaataattagaatatttatcttttaattcaatcattgcttacactgttactgtaccacataattgcgtattatgaaagcgattacattaaattgggagaaaaaagttgacctccgaagaaatcaacttgtgcccctgccaaggacctatattatagcattcatttattctgcatgatcatcctttttctcagttgagtcaggattttgatcgtcagacttggtgaagtcaccattcatggtattaggacgaccagtttgataatcaactgtgtgcttttcagccttaggtgcgctttgaccaggttcaggcataaccatagcagcaataatatataaggcaacgccaggaaatacacctgtgaataatatcaatgcagcaccgatgattctaacccaagcaggatctagatcaaagtagttagcaataccgcccaaaacgccagctaaaattttattttgtgattttgtaagtcttttttgcatgataatcaactcgtttctaactgttctatctcttttacatatattatacagcaaaggcatgaaaaaagtgttgattgctcaacacttacacataattatgatgcccgctaaaagattcgaactttcactcagtcacctgaacagcgacctgaacgctgcgcgtctgccaattccgccaagcgggcaattttctttggtacatgaataatcataccaaatatttggtaaaatgtaagcataaaatactttaattataaaaaaggatggaaattcatgttttttagcaaaaaaataaaacgtgcagcaattaccacgattgctgcagtatcaattttttcttgtggtgcggtatttgcaactataccagttagcgcagatacaactagtagctatcaagctgatcaagttaaactaaatgtaaagtcagcaattgcaattgatagtgattcaggtcaaattttgtatgccaaaaatgcgactaaaactttgccaattgcttcgatgactaaattagtaacagtttatttaactctgcaagcaataaaaaatcataagctttcatgggatcagaaagtaaagccaacggctccgatagtaaaggtagctaataatgcagaatattcgaatgtaccattaaaactaggacattcgtatacgataagacaactttatcaagcaaccttaattgaatcagctaatggtgctgctatgctgcttggtcaaacaattgctggctcacaaaaggcatttatcgatcaaatgcgagctcaagtaaaaaagtgggggattgaagatgccaagatttatactgcttgtggtttacctaatggcaatttaggtaaagatgcatatcctggtgtaaataaaaatgctgaaaatacgatgtcagctaaggatatggctattgtcggtcaaaaattaatctcggcattcccagaagtattagaaactacacgcttagctcacttaaactttaaagatgctggtcacgtaactaagatggctaactttaactggatgttaaaggggctttctcaatatgatcaagcttatccagttgatggcttaaagacggggactactgatgctgcaggggcttgttttatcggaactgtacaacacaatggtgctcgtttactgactgtagtaatgggcgcacgtcaccgtgacggaacggatccagctagatttgaacaaactaaaaagttaatgaattatgtttttaccaagtatcgtcctgtaacaatgactgctggtagccaaatgaatggcgctaagacaattaaagttgttgatggtgataatgcaactactaatttaggacttaagcaaaagactactatctgggatccagctgatggcaaaactttagtggcatcattgaataaaaaatctgtagaagcaccaattaagaaagatcaaacagttggtgattatcaatttaaatctggtaatgaaaagattgtttcattgtctaatcctaatgggatgaacgtcaaggctaaggcattgtcagctaataacaaggtgaacttttttgtcagaatttggcgctggattttcggaggaagataaatatgactgaaatttctgaagatatcttgaaaaaggtaattaaagaaagagaaagcgatacacataaaggcgattacggtcgtgtactcttgatcggtggtagtgagaactatggtggcgctattattatgtctaccgaaggcgctattaatgctggcacaggtttgactgctgttgcaacacaccctttgaatttagcaccgttacatgcacgagtgcctgaagcaatgtttatcaactggcgcgatgctaagttagcagatttaatcaaaaatatggatgttgtagtttgcgggccaggattaggcatgagtgatctcgctaagcaaattttagttatcttgcgaagatgtacttcagaaaaacaaaccgttgtcttagatgccagtgctcttgatttaattagtcaggataagaacttattgccaactaatgctggccacttaatcttgacgccgcatcaaatggaatggcaacgattgagtcaaattcgtattccgtttcaaacagatagtgccagtattgatgctttaaaccaattgattccagatactaatgcgcttttagtactcaaatcgaatcatactcatgtttataatgggactggtcaaatttttgttaatccaattggcaatccaggcatggccactggtggaatgggtgatactttagcaggaatcatcggtgggatggttgctcaatttggcccaggcgttgaaaccgttcaagctgctgtctatcttcattctttagcaggtgacttgcttgccaaagataattatgtggtacgaccaacggaactttctaaagtattgcctaaattgatgaaaaagtattcagaattggcataaacatgttaaaattctaatagtaaataaatgcatccctagttgagggatgttttttaacgcttcaaagacgaaaaagcataatataattgagttaaatattaataaaaaagaagattaacatatttatgaaaaaaaacattattatcggcgtaactagtatcgttctagcttttggtgcaattatcggcttagctaaggtatgcgcacctaagtctgatgtctcacaagaagctgctacaacgcagactaaggccaaaactaagaaaataaataaaactaagaaaaaacaaactaaaaaagtagataatggtgctttatatcgaccatatagcgatcctaaggacttgcgcaaggcaggcacttggaagaaaaagagtgagcctaaaaaatatcctaagattaagccatatgaaaaggatttgactttgcgggtatcattaaaaggaaaccggacctatttgttaagaaaaggcaaggttttgtataccatgttatcaactggtggaatctacaagaagggcaagtcattgaccccaactggaacttttaggatccaaaatggtcgtggagacagctttttcaattataacttaggtgaaggagctaataattggactagttggagtcctgataacgtgtacttgttccactctgtgccaactaaagctgattatagctataacttaaaagaagcagtcaaattgggaagaactcaaggttcacatggttgtatccgtttgagtgtacctgattctaagtggattatggatcacatcccagatggtacgaaggtaatcattaaaaataattaacaagaacgttgctttttaagcaacgttttttaaaaaattgcagtaaaaaactttgttcaaagcgttcaagattttaatccaactcaagaatggtttttttaaccaaattagtggcagaagccgttttttcctgctataatcatgtttgccaagaagtcaaaagtagtagttattttctttttaagcgagtctatgttggtgcaagatagatactagaagataatgaaggcgtgtttgactgataaaatcaagaatttaaataagcggatactttgtatcaatctgagtggtaccgcgggtttttaactcgtctctttctacatttgtagaaggagacttttttatttagaagagaggaataagatggactttaagaatgaagtagttgacttggttgctagtcaagttgatttacctaaagaaaaaattgctgcattaattgaacgccctaaaaatgctaagatgggagactatgctttcccagcatttattttggctaagactttgcacaaaaatcctgcagaaattgctaaaaatattgcggataacttatcaagtgataatttcgctaatatccaagcagtcggtccttacgttaactttgcgattgaccatgaaaaattagtttcatcgactttgaaggatgttttgactgaaaaagaacattacggtgatcaaaagattggtgaaggaaatgtgccaattgatatgtctagtcctaacattgctaagccaatgtcaatgggccaccttcgttcaactgtaattggtaattcaattgctaagacaatggagaaggttggctatactcctgttaaaatcaattacttaggtgactatggtactcaatttggtaagttgattgctgcctacaagcactggggtaatgaagaagacgttaaaaaagatccgattatgaatcttttccactactatgtaaagttccaccaagaagctgagaaaaatcccgaacttgataatgaaggtcgtgaatggttcaagaaacttgaagacggggatccagaagcagttaaactatggaaatggttccgtgaggtttcattaaaagacttcaagcgaatttataaagaactaggcgtaacttttgattcatacaatggtgaagctttctttaacgataagatgcaaccagtaattgatgaattaaaagaaaaaggtcttcttcatgaatcacgtggtgcgcaagttgttgacatgggtgaaggtgaaaatcctgctattatcgttaaatctgatggtacttcaatttacttaactcgtgacctcgccgctgctgaatggagaatgaaagaatataacttcgttaagatgctttatgttgtaggtaacgagcaagcccaacactttgttgaattgaagactgttttgaaaaagatgggttatgactgggctgatgaaattcaccacgtaccatttggtttaatcacccaaggtggtaaaaagttatctactagaaaaggtaacgttgtcttcctcgatcaagtattaaaggatgctgtttcacttgctaaaaaacaaattcaagaaaagaatccagatttagcagatcaagatcaagttgctcatgatgttggtgttggtgccgttgtcttccacgatttgaagaatgatcgtttagacaattttgactttgacctagaagaagttgtgcgttttgaaggcgatactggtccttatgttcaatacactaatgctcgggcacaaagcgtcttacgtaaggccgctgcgatgggtgaaaatcctagcgaaactgatctagctcttgatgatgactgggcttttgccgtagccaaagatttagcagatttcccaagaattgtagctagaagtgccgaaaagtttgaaccttcagtaatagctaagtttgccttagatttagctaaaaaactcaataagtactatgctaatgtgaagattttaaccaaggacgataaaattggtgctcgtctcgccttagttcaagcaacatcaatcgttttaacggaatcacttagattgttaggtgtcaatgctcctaaagaaatgtaagagaaaaacaatgaaaataagaaaataacgcttacatttagtgaaagattgttcataattccagaattagggtacaatatgcatgtaagatatttaggaggtattttttaatggcttattttgacaacggtaatcaaatctttaaagatgctcgtaagaaccattacgctgtaggtgcttacaacactaacaacttggaatggactcgtgcagaattacgtgctgctgaagaaactagaactccattgttgatccaagtatcaactggtgctgctaagtacatgggtggttataagttcgttaaggacatggtagctgaccaaatggattcaatgaacatctcagttccagttatcttgaacttggaccacggtgactttgaatcagctaaggaatgtattgctcttggttactcatcagttatgtttgatggtcacgcacttccaactgatgaaaacttggctaagactaaggaaatcatcaagttagctcatgaacgtggtatttcagttgaagctgaaatcggtaagattggtgaaaaccaaggcggcggtgaattagcttctgttgaagatgctaagaagttcgttgcagctggcgttgacaagcttgcttgtggtattggtaacatccacggtgtttacccagcagactggaagggcttgaacttcgaccgtcttaaggaaattgctgaagcagttcctgacactccacttgtacttcacggtggttcaggtattcctgaagaccaagttaagaaggctattaagcttggtattgctaagataaacatcaacactgaattccaattagcattccaagaagctactcgtaagtacatcgaagacgaaaaggaccttgacaagaaggctaagggttacgacccacgtaagttgttattgccaggtgcagaagcaattaccgccaagatgaaggaaatgatttcttggatgggtaccaagactatcgatgacgaacttaaggatgcttcattcgaccgttcatcattgaacgaagaataatcatttgataattatttaaataaagtctagcgtttgctaggctttatttttttaggcaaatttggtgataacttaattgaacctattataaaagaaatataaaataaaaaattgaattataaagaaagtataaaaagagacttttatggaagaaaaaatgttaaatccatttatgcctagctttggtcgttttcctaaaattattattgatcagcaagaggcattaactgattacttaactggcttacaaacgcacgatgctaagtatcaaacttctttagtctatggcacaaggggatctggaaaaactgtttttcttttaaatgtgcagagatctttagcaaagctagataattggatatttattcgtttaaataatggtcaaggaaatttgctttttcaattaatgcatggtttgcaacgagttgcaggtatttcgttagttgacttgttaaaaagtgttaaaagtttgaatattatgggaaagggaattacttggcaagcactacaagaatcacagcaaattgattatgatgagtatatttcaattttgctaagtcgattaaagaaacaggggaaatcaattttaatcggaatagatgaaattgaaattagtgatgatgttcgagcttttggatcagaatatcaaacattgattggtgatgaataagatatttcattattgatgacaggattgccaagcagaatatccgaagtacagtatgataataccctcacgtttttactacgtagtaatcgtgtttatttatcaccgttggataaaaaaacaatagctaatagctatgagaaagcatttactaaaggaaaacgtgaaattgatttcatggtattggatgaaatgagccgtgcagttaaaggctatgcttatgcctttcaaacgattggttattatgcttggcgatttagtcgggaattattgcagttaaacgaagaagttttgaaacaaacaattcgagctgcaaaaaaggacctttttaggaatgcctatgaaagaatgtatatggatctttccaaaaatgatcgcgattttatcgaagcaataatcaaagctggaaccgatcgtgtcacgacaaaacaattgcaagatatcttaaacaagccgattaattacatttcggtatatcgagcaaggctgttagatgaccaattgattacatcccctcaaagaggagtagtacaattggcgttgccattttttgcagagtttgttgaaaaatctaatttagaacatttatcttagaaaatgagcaaatataataaattatggcaatatatcaaagataataaggctggggactttgagctttcttttgatgagcttggccagcaggctggggttgccttagatcattcctttttgcgttataaaaaagaattaccagcttatggctttgaggtgcaaaaaatttcattgaagaataaagtggtgaagtttcatcagttgtaatgaaagctattaataactaaagtagtagtttgcgataatatcttcaaaattagtaactatgttttgttttagaaaaagactaagatgtaagtaaaaaatgggaggattaataagttactatgaagaaggttttatcttggccagtatattatcaactatcagagatttatacggcgccattaaatgtaatttggtttgtctttggcgcggcaatgtcgtttcaacaatatcacatgtttaatttgattaacattttactgtgcttagtagatgtttttctgtttgatttagcagttaatattgctgataattactatgattatcttcatggcaaagatcgacattttttgactgatataaatccaattggtcgtctgaagttacctttaactgatgttagaaacttagtgtggattagttactttatttcggcgattccgggtattattttggtttatcgcaccggctggccagtactaataatgggagttgtaggatatttcattggaatattttacactgcgggtcctaagccactgaatgcaacaccgatctgtgaattagtggtatctttttttatttcgtatttcattatgctagtaagcatctatgtcacaatttacggcacttatcctttgacctggaacttagcattaactactctgataagatgtttgcctttaacactcattttctatgctttgcagttagctaataatacttgtgatttgcatgaagatttaaacaatgggcgccatactttagccagttatactggtaaaaaatatgctcttaaaataattaagacgttgattattgcgggattattatttccaattatcgttgttctttttggtttagcaaaatggccattgatctttagttgttttttgttgccaatattatggcaaaaattaaaacaattttttgagcatccggataaacaaactacctatttacaaatgattaagtatttatcaatatttttcattacatatatagctatttatacagttttggtggagactgtaaaatagtttgtgtaaggatgaatgattccttaaatttatttctttaaacattagaaaaaggagttcctttctcgtatgattggtttgaacaaaaaaacacatacagaaagaagaactccttcatgaatgattttaccaaagattttgctcaagctctattcaatccagacaaaataaatgatttattgcgcaaagagctacaacaggctgttaataacttgttagaagctgaattgactgcctttctgggctatgatccctatgccagaaatggctggaatactggcaactctagaaatggtgcttattttcgcaaagttgatacgcaatttggcccaattgaagtgcaagtgcctcgggatcgcaacggtcaatttcatcagcacacgctgcctgactacaagcagcactcggatatcttggaaagcatgattatcaagctttactccaagggcgtgaccaccagggaaatagccgatctaattgaaaagatgtatggcagccattacagtccagctcaggtatcaaatatttccaagcagatgattccaaaggttgaggcttaccacaaacgcaagctaagcgacaagtttttctgcgtctatttggatgcgacataccttcctttgcgccgagaaacatttgagcgtgaagcagtctatattgccattggcatcaagcctaatgggcacaaggaggtcattgactactgcattgcacctagcgagaacattgaagtctggacagatatgcttcaaaacatgaaatcccgaggcttaaagcaagttgagctttttctttctgatggtgttgttggcatgaaaacagccttggccaggacttatcctaaagctcattttcaacgctgtttggttcatgtcatgcgcaatatctgcgctaaagtacgcgtcgacgatcgtgaaaagatcatgaacgaattcaaacaggtgcatcaacagacaaacaaagaagaagccacagctgtcctgcatgacttctataccaaatggggcaaggtttacagccatgttatcagaagcttgaaagacatagaaccagatctgctggtcttttataactatcccaagcagatcagagcttcaatttattcgactaacatgattgaatcatttaacaatgtgatcaagcgcaaagctaagcctaaggcagagtttccaactgaacagtcgcttgatgtatttattggcatccaggcaatgagctacaatgaccgctatttcgaccgaattcataaaggctttggtcaggttcaggataccttagaatcttattttgaataaataattaaaaaatcaatttgcgagaaagaactatttacacaaaagatttgacagtttccaggattgcattactatagtttatgtaagttatgaataggtagtaagtaacttatgaatttcaagatattcattgatttaatgaggagaacgaaaatgaaaattttcaacaagaaaaacttattattgtcatctgcagttgttgcagggatgctattcacagttggtactaaggctgttcaagctgatacaaccgatagttcacaacaagcaactacaaatactttaaaggtaaatgcaaatactgcagttccagataagaatttgattacgccagtagctagccgtgataatcaaactcttcgtcaagttgcagaagcaaacaacacttcattaagtgtattggaaaagttgaatgataatattgatccagataaaaccattgctaatggcacgccattatatcttccacaaaatgaagatttgtcaggactatttggtatatatcttagatcagatacttcagttccaagctcattaaagagaaaatattatgatagtctttcagcaaaagagagagctgctaagatgtggattattgcacgtgaatctggtggaaattacaatgcaagaaatggtatctatattgggcgttttcaattaacaaatacttatttaaacggaaattatagcaaagcaaatcaagaaaaaacagccttacgatatgttaagggacgttatggttcatggtcggcggctaaaagattttggcaggctcacaactggtattaataaataaacggaaagtggaaaaaatgaaatttcaaaaattagtaactagtgtattattagtagctagtaccactggtgtattaatgactgcacctaaacgggttcaagctgtagctgataccaatactactgagagtggaaaacccgtcgcaaatattgttaataagcctaacctaacaaaacaaggttatgtgttaactattcaagccccatcagggaagatttatgtagggcaaaagaattacaagaaacaattaactactactaagccaatatctaacgcaaaatcagttagttggaagaaaattaaaaacgttagatttagaattgaaaaagttgcttatgcgacaaaggttataaaatttggtggagcaccacagtatctgcttgtctctaaagataaaaaatatagttgctggacaacgcgttattctattaaatactatttttggaatactaaaaagatgcaacaagtaattaagccattgtctaaattgacaactagaaactcttcaagcctaaagaagattcggaataagcaagattttaatcaagctgtattagctgctaaaagattacctgctaatcaaagaaaagttgtcttagaatctttgaatcaagtgaaaaaagttggcaatattgataaggctgaagataatattttgttgttcagcttttagtgatatttctagcacagatttaaaattaatataaaactgaagttagaagaatttatttaatgttgagggggaagaaattgtgagaagtatatctaaaggcattgtatctttgatagcagctacaatgttattagcagcaggggaagggatagttcctaatactgttaatgcttctatgctagattcggctaaaagtagccagaatagtcaagaaagtagtagatacacttggcagagtgttaagctaacagatggaactgaaatgcaaattcttccagataattcttcaaaattagctggaaagattaaatataacggtcaaatatattcatatcgcattgtttcaaataatggtgtatatactatttatttgaataatgaggaagtatattcagttgatataaataatagccagttacctacgacaagtgtaggtggttttgatccatttattaattttacgtacgcaaatggtaaggtagcatttaaacatgcaggtagaaagtattattatttgacgacagagaaatatagtgcagatacggtaagaagactgaaaggaactactaaggatattattattggtttgcttggatttgttcctgtagttggcccctatgtttctgccggcggttttgcctatactgtttataatgatatttttggaaagaatcctaaaaataaatggtatacgataaaagaatattgcactagagggtatgaatattatgcttggaagacctatacttatactgactctcatagaaaacatctacaatctgttaaatgggagtataaaaaagtattatgagaggaattttaactagtagagttgctagaggcatattagcgtttatatttatattttttacgggttggtctgctgcaagattaatagtacagatagaacgttctgaatcgatatatgactaccttattttgggaggatttagtctagttttaggtattttggaactctatagattaataaatagtaagtaacctgaaaattttagaaaattgaacgttaacgtgaatatcaatataacacgcttagcttaaatagtcttattagtttttataattcagtaagataatcggcaaaatggtaatatttagttgtagtcgcttcaaaggataaaaagtattcaacttggattactcaagctttcttgcaatactactacctaaacagcaagtctatgcaaggtgtgattaagccactcaagcgaattgctaatagattaaataccagtctgaagaaggcaaacaacaaacgtgactttaacgctgcaatgaaagctgctaagaagttacgtggcagtcaaagagattttgttttacgttcattgaatcaacttaagaaggatggctccatgaatgtagaaggaaagaacttgttattgtttggcttataaaattaagatattaagtagtaaagctcagcgaatgactgagctttatttttctaaaaaataatttttatgcataagaaaagattagttattagcagtatatttgtgcttcttatcattgctggaatagggataatattttttagcaagaattatgggcaaagtaatactgtggttcgagttcaaactgtaaatattaattctaaagctaaaaagattgctaactatgacgtgcttgcaaatggaaaaacacgtgagtctcatagtacgggtgattttagtacggcagaaagaatcaaggttagtccaaatatttttgacacgtatactaagaaaaatcaaactcatttaagactattgaaagaagtgccattatataatcaaaagaaacacaaagttgatgatgctaattattggaaaatgataaacagcattactaaaaatgtgcacgctgatatttataaattgacattgtttaaggcacatagctcttattatgcttatgtgcaaattaatcagtggattttagatgcaggtactctttatgaatataatcctaagtcgaacattttaagaaaattgtgtgattttgatggaaaagaagtcataaatattagccattaatccatgataaagctcagcgaattactgagctttatttttttgtgaacggtagtcggcaaacagtataataaacttataccaaaaacattgaagtggattatatttagaaaagaagatggaaaatggctaaaaagttacgccacgcttggtattagcgattttgtcggcagggatgctctcatttttaggaatattggatgaaacagccacgacagttacttttccaacgttaattaaagaattttcgattaccactgatcaagttcagtgggtaaacacactagtcttattggtaattgcgactatcgtaccgattagttcacagattagattaagaatttcgactaagaaaatttttattctaggagttcttttgtttactttggggctaatcatcgatattttatcaccgcgctttgatttattgttattaggacgggcaatgcaaggagtcggcacggggattggcttaccgttaatgtacaatattatcttggctgaagtacctaaagaaaaactaggctttatgatgggaatcggcactatgattactgcctgtgccgttgccttagggccagtttttggcggaatgattaccgatgcacttaattggcgctggatcttcattatttcgctatttttaatgaaaaacgcccggaaattccccgtattttaatgcggggatggatagggccaagctgacctaatggtcagctttttttattaaaaaatgaagacatatgttcgacttttctgtaaaatataaatatctaatctacagaaggaggtgaaacacatgaagagaatgagcagtttagcctaccattttggcttgaaagtacgcttttatcctagttctaaacaaaagaaaatcatcaagctaaattatgatgctcagcgttttgtctacaactcttatgtaggacgtaatcggaacaattatcgggctaagggctacttagctgttagacaatatcaagtaatgccttttgccttttctgttcttaataattatgagactaagctagcagaagaagtagtcgccaataatgagttattggctaagccaaagaacattcgcgatgcctatagctttttacgcgttaaagaaattgacagtctcgctattgccaatgcgattcaaaactatcagaaagcttggaacaactatcgcaagcttggtcatggaattccgacttttcacaaaaaacgtagtgattggtcatatcagaccaactgtcagtatcctaaacagacagaagcctttcttgataacgggacagctagatttattgatgctaagcacgttaaattgcctaagctaggcgttgtccgcattgccagctttagaaaactgattaaagagcgcttgcttaatcatatctcaactagaattgggacagtgacgataaaaaagaccgctgacgagcaattctacttatcaatgcagttaggcagcgatattgcctttgttaaagccttgcctaagacgcagagtcaacttggaatagatctcaaccttgataatttcttgacggattcaaatggatcaatggtcgctaatccatgcttttaccgcaaagccaaaaagaagctggctcgtgctcaacgagtattatctcgcaggcagcgccgggctaaaaaagaaggacgcaatttgcggctagcaaaaaactatcaaaagcagcgcttatcagttgccagactgcacgacaagattcgcagacagcgtgaagacttcttacaagttctctcaactgcattaatcaaaaaccacgatttagtagttgccgaggaattaaggagcaaaaacctgcttaagaatcatgccttgtctcaagctatttctgatgttggttggcgtagttttctgaacatgctggcttataaggcagatctatatggcaaagaatttctaacaattgatcctaagtacaccacccaaagatgccatcaatgtggcagtattatgggccaaaacggttataagaaattaacccttaaggatcgggaatggacttgcccaatctgtcagatgcatcatattcgtgattggaatgcggcagtgaacatcttagaaaaaggattaggcaagtggcagaatcctaaaataaaagaagcagcctagaaaggctgcagtccgctagcaactcgcggacttaaaaggctttggtaattagacgacctctatcggcaatagtcaaaagattactgctggtaagtcaaatccgtatctaagcaagttggtgttctggttagcgcaagctaacgagccagccaccaagccccagaatttattctggggtagttgacttatcttgagtctatttacgggaagctattcaattcggcagattaatccgcttgaaaaagtgaagttcaagtatgtgcaatggctatctttggctattgggctggtctgtttaatgctgggctttacacggattgctaaacattcatttttctcaatccgagtttggggcttcttaatcttaggaattattagtttattaatttggctcaaaatatcttggtccgatacagcagcattgattagtccgcaactgtttaaaaatttacgttttagcatgcagttaatagcttattgctttgccaaaattgcgatgctagctttgggttttatctttccaatctatgtctaagctgtcaattatggttccgtttcattagccggtggggttacttttcccggtgcggtaattaatgcgttaatggcggccttagcgggcaagctgcttgataaaaaaggcgcgcggttgccgattattataggaataattgctagtttgactagtttaattttgatgaatgttttggcaccattaagcaatcttgccattgtattgttatatgttctttattatagcggatacgggatgtgctttggcagtttaatgactagcggttggattactttaggtaaagctagccacgcacaaggtaatgcgatttttaatacgctgcaacagttttcaggtgcactggggactgctttagctgggactgtgattgcgctagcgcagaataatcatgtaggtaatggtacagcagtcggttctaaatggacctttatgatattactaattttgataattattaagttattcttggctcttgtgtttgtaccgaagaagagataaaagaaagttcagcgaaagctgaattttttattttgtaaatatattaactttaaatacgtaatatttgattaatatactaaacgaaactgtcgaaactgtcaaatcttttgtgtaaatagttctttctcgtaaattgattttttaattatttatttaatcaaagtaggattctaaggtatcctgaacctgaccaaagcctttatgaattcggttgaaatagcggtcattgtagctcattgcctggatgccaataaatgcatcaagcgactgttcagttggaaattctgccttaggcttagctttacgcttgatgacgttgttaaaggattcaatcatattggttgaataaattgaagctctgatttgtttgggataattgtagaagaccagcagatcgggctcaatttccttcaaacctttgatgacattgctataagttttattccatctggcatagaatttgtgcaagacagctgcagcttcttttttgcttgtctgttgatgtatctgcttgaattcgttcatgatcttttcacgatcgtcgacgcgtactttagcgcagatattgcgcatgacatgaaccaaacagcgttgaaaatgagctttaggataagtcctggccaaggctgttttcatgccaacgacaccatcagaaagaaaaagctcaacttgctttaagcctcgggatttcatgttttgaagcatatctgtccagacttcaatgttctcgctaggcgcaatgcagtagtcaatgacctccttgtgcccattaggcttgatgccaatggcaatatagactgcttcacgctcaaatgtttctcggcgcaaaggaaggtatgtcgcatccaaatagacgcagaaaaacttgtcgcttagcttgcgtttgtggtaagcctcaacctttggaatcatctgcttggaaatatttgatacctgagctggactgtaatggctgccatacatcttttcaattagatcggctatttccctggtggtcacgcccttggagtaaagcttgataatcatgctttccaagatatccgagtgctgcttgtagccaggcagcgtgtgctgatgaaactgaccgttgcgatcccgaggcacttgcacttcaattgggccaaattgcgtatcaactttgcggaaataagcaccatttctagagttgccagtattccagccatttctggcatagggatcatagcccagaaaggcagtcaattcagcttctaacaagttattaacagcctgttgtagctctttgcgcaataaatcgtttattttgtctggattgaatagagcttgagcaaaatctttggtaaaatcattcatgaaggagttcttctttctgtatgtgtttttttgttcaaaccaatcatacgagaaaggaactcctttttctaatgtttaaagaaataaatttaaggaatcattcatccttacacaaactattttacagtctctactaaacaaaattataattattttgatcaatataattatataggagcaaaatatgaatccagatttacttgcggcacttattcttgaaggtcaaaaaaatattaaaagtattgctatcattcctcgtgattatcattttgaagatagtttgaattatgtgttagtaggcttgcggcgggctggcaaatcaacgttattatttaaaagagcacaggatttagtagataaacaaaatgtggattggtcacaaattgtttacttgaattttgaagatgaacgactagatggttttcaattagctgattgtaataatatcttaattgcagccaatcaattaacaactaagaagcattattttttatttgatgaaattcaaaatattgctggctgggaaaaatttgctcgtcgtttagcagatcaaggtgaaagtgtttatttaaccggtagtaactctaaggtgttgggtcatgatattgttctgcggctgggtggaagatatatgaccaaatatgtggcaccttttagttttacagaatatttaactgctaaaaaaattccacatgataaattatccgtcttggatacagttaataatggccaaattcgtgctgccgcaaatgaatatctatgttatggtgggttgctagaatctattatcttaacagacaagagaaattacttaacaagtatttatcaaaatgtatttttagctgatatcattgtccgcaataagattcgtaatgaaaagacgatttcactacttcttagaaaaattgccgatacagtaatgcaccaagtttcatatgcaactttgtataaaaatataaaaaatgtgattagtacggtaagtcgcaattcgattattgattatattgattacgctaaggaagcatatttgttattttccaccaaaaattattttgctaatttagtgagcgtgaaagcagcccaaagtattattttacagataatggcattttaaatttgttttatctggataaattgccagcattactagaaaatctagttgcgatcaagttgcataataaatatcaagagaatttattttatttaaaatctcaaaagacagggatagatattgatttttatgtaccagctagtaaaactgcaattcaagttgcatgggaagtaaatgatacgtcaaaagaacgtgaagttgggaacctaattaaattagctgataattttgatgaagttgaaaacttaataatcgttactcatggtgaagaggctgaaattcagcaaaaagataagataattcagttaatgccactatataaatttttattaatgagatagtttttcgataactcataaaatggtaatgctcaaaattttttgagcattttttataactataagatctaaagagatataaaattaaagccaacaactaaaataatgaaaataggtgaacatcaattatgtctgaaataacgaatccatttgaccctaactttggcaaagttcccaaaatatatttggggcgacaaaaaatagtagaagatatagtaagatcacttgaaagtggcaccggaccctatcaaacttcaatgatctatgagatgcgcggggttggtaaaacttcattacttgctgatattacctcaactttagaacaaaaagataactggattgttatttacttagccatgacaaatgatttgcttgccacgctcatccaaagtatttatcaagaagcagcgaatccagtaaaaaaggcgttgaacaaaattgatggtgtaaagttttcggcttttggctttgaattggaagttcatatatcaaatcctcaatctacttatcaagtgttacttgaagaaatgttaaaagttttaaaaaagcatcaccaatctttattgatagcaatagatgaggttaaagaaactcctgagattgttaatttggcgtctatctatcaaattatggtgttaaaaaagtattcaattaatatgatgatgactgggctgcctaagaatgtttctgaactccaaaataatgatgtattaacatttcttttaagaagcggtcgtgtaccattaggaccacttgatcttttcgatattaagtatcggtatcaaaaagcatttgaaagaggtaataaagagattaataatactgccttaatgaaaatgactaagctgactagaggttacgcttatgcatttcaagacttgggatatcatgtttggcaacattctactgatcaggtaacagatgaaagtattgaaaattcgatctcatcgtttaaaaatgatctgtttcgtaatgcttatatcaagattatctctgaattatcgccagtcgatcgaaaatttttattcatcatggctcataatgataaaaatgttgttaatataagtgatattcgcaagcaaatgggaaaaagttctaattatatttcgcaatatcggcagcgattaatggatagtcaggtaatcattgatgcaggatatggcaaagtggcattttctctgccattcatgaaagactttttgttagaagcagaagaattatatgaaattgataactaacgaagaaagttgctctcaaaaatagagcaactttttatttgataattagactcttcgcttttgtccaccaaatgcgtaaacaataagcagaggtaaatgataagatccaggttaacagccagattccaaagaaagttaagaatgggtggtaaatggcgtgatattgcatgttaagaccgcgccaaactaattgattccagaagacattggataaatatgcgcgataagcataagtagccaagaaatggaatacttttaaactggtttgcgaattttttctaacttgatgcaggcaaaaagctgaaatcagtgcaattactgctaaacaatagagagtcattgacggcttgtaatatggtgcattattgaagttgattggataaccgaacttgtgcaactcaacattagtccaaatgaagcaagcaataaataatatggtaattaaccaccaaaacttagtgaccagctggttgtaataaccacgcaattgccatgctaagacgccatacacaccatagatgaagaatgaaataaaaatgcggtcgagtaaataccaatcatgttcatgcatgccgtgaaagacgttgtaatcatagaaccaaagccaggcaaaatagagtacgaaagtgattactgcaatccaaatgcctcgagttagattgtgtcctacatagcggcttaatccccagaagattggcatcaaaataataaactgcaacatcatcgtgttgtaccacaagtgcggggcggcattaccattaatgaattgccaacagaatgaaccaatattgttaaaatgattaacttgttgcaaccagggcatccctaatagataaatgagcgtccaccaaatagtaggtacaaaaagattagaccaatttgtctgcatatgttttgcataagaaaaactatttttttcattattagtacggattgtggtatacaaaataccaaaaataaaggctggagccgtatatttgactaaattataaaaaacgccaaaaacatcttgtgtgtgaaccggttgttctacgtccatgaccagcgacataattggctgtgagattactgcgctgcaggcgaatacttttaaataatcgccaatatcagctatttgatagcttttaaattgatctgttttcatgaacttgctctcttcttttcctaatattattgtgtcatttttttaaattaggcgaaaggataatcatgttaaaattagtttagctattttggaaatggggtcaaaatgtcagtagaaaagatcacacaaaacgcactaaaagcattgctttatgaagtagttaccaatcctaagccaggtttagtggatccagttgacgtggggtctcatcctgatatgaatgtgtatttgtttattaatagcagtttgagtttagaaaattattttcggcaagcagctaaaattggagcagattttacggggcaggatttgcggcaaatgtttgaacaattgcgtcaagctggcattgaggcagaaaaagcaatgtttaagacaacacataatataaatacccataaaggcgcgattttttcgttagggttgtttggctgtgcaagtagctattgtgaaaataataatcaaggtgaatttgaagtgatccagcagatgactaagggcttagtaaagcacgatttaggcaagaggaatgagactgctggagaaaaacaatttttgcaatatggtaaaggtggagttagagcagaagcagaagctggttatcctttggtgagggatgtagcactgccatttttagctcaaaccgaaggtgatttgaatgttcgtttactcgatacgttgatgaaaatagttagtgcgattgaagactcgaatttaataaaaagagcgggaaatattgaggttgtttcttgggcacataatcaagcaaaaaaatatttggcattaggtggctacggtactcaagctggtaaacagtttatgttagaactaaatcagatttttaaagagaaaaattatagccttggtggcagtgcagatttattgattattacaatttttatggcgttgcagcgtgggattatttaacgcaaaaattgtctagttaagaactagacagtttttttgcttttagatttaaagagatttaaaatgaaaaatcctgttaatccgacttttggagatataccacaaatttttttaaaagataattcggataatgaaactaaaaatgtagattcaattttctatttaggtttagataccgagtattgaaaaagtgtctgggaaaaaactaattctcagacaggaaaaaagaacgatgatttcctaatggatttcatcgttctttttctatactttaagtgccttccttgatattattgaatcaccacaaaacaaaaagaaagaaggcaatcttaatgtatcaaaattataccataggtcaaacagctttaacactcaacttagacttcgctattcctcataatcatttggctaataccattagctggtttgtcgattcaattccagaagatgtcttattgggtaatactgctaaaaccggtcgtccagcttatcatccagcgatgatgcttaaaatcttgctttttgcttattccagaagagtattttcaggcagaaaaatcgaattaatgctggaagaaaacgtgccgatgatggctttggctgaacaccaacagatttcttaccatactatcaataactttagatccagcaagcatgccaatgagctggttaagaaaagcttcctctactttaccaatttgttagaagccgagggccttatcaatgaaggagcgatctttattgatggcactaaaatcgaagctgacgccaatcgctatacttttgtttggcgcaaggcagttgaaaaatttcatgacaagctcaaaggtcaagcggttgagctttatgatgaattgattgccaaagaagtcgtcaaagcaatggcaaaagagaaagtccagaccagtcaaggtttggcagagctagcacaagaaacggaagccgagattgaaaagctgaccgaagaaattgagcaagaacccaaagcaatccctggcggttcgcctagaaaagcaagaagacgcggtcttaaaaagctgcttcataaactaagaaaagactatgttcctcgaatgaagaaatatgaagaggcgaaagaaatctttgcagggcgtaacagctattctaagacagatcatgacgcgactttcatgcatatgaaggaagatcacatgaagaacggccagctcaagccaggctacaatattcaagccgccaccactgatcaatatgtggttgactttgctttataccctaatccaactgatttcagaactttcgaaccatttttaaagcagatgacgacactagacaagtttgacaagattgtcgctgatgctggttatggcagcgaatataattattcaatgttagaagaagagtattcagacaagaagtactatattccttataccatgtacgaaaaggaaaagaccagaaagtatcgcaacgatccaactaagctggctaactggttctatgatgaaaaagatgattattaccttgatcaaaatggcgtcagattcaacttcaaatattatagtcaacgtaaagatcgatcgactggtcaggttcgtgattttaaggtctatgaagcagatgaatttcaactaacgccagaattagaacgcttagccaagactaagagcggacgccaacgtcaggttcgctataatcctaactggcaatacctaaaagaaaaagccaaagcagttctccaaagtcctgaaggcagacacatctacagcatgaggaaatatgatgtggagccgatttttggacatttgaagaacgtctttggcatgcgccgaactcatttaagaggcaaaaagaaggttgaaacagatataggaatagccttcatgatgatgaatttaagcaaatattggaacagaagatggtcaaaagaccaattttctttgttcaaaaataaaaatagacagaaaaagacggtcaagcaactcaaattaagagttggattgatcgtctttcagtatctaagggttagttttttcccagacactttttttactatttgattagatttcttataatccaaatgcaattttgtataataatgcaccacagattccacctgcaattggtgcaaccactggtacccaactgtaatcccagtgggctgaacctttgtgtggcaaaggacataaagcataaacaattcttggacctagatctctagctggattcaaagctggtccagttggcccaccaactgccataactaaagcagtaattaagaaaccaaccccgatgttagcaatgtcttcagattgcttgaagaacatgccacgatataaaccaactgcgatgaaaagcaaaatagcagtgccaaagaattcggtaataaaaccgttgaacttactgttagccgaatcaccagtcgcaaaactggcaaaaacagcatcatcactagtggttctgccaatgtaaggccagtagacggctactaagattagttgtcccacgatggcaccaagcatttgtaccaagatgtaaggcattacttgatcccatgggaagacgcctgaacaagcctgagctaaggtaacagcagggtttaagtggttccctgaaattgaaccaaagagcatggctgggagcattactccaaacccaaaaccgaaggcgatcaagagccacccaccattggcttgaccgtcacggctattaccaccggtatcacgtagtacagaattggcaactgatccgttacctaaaacaactaaaataatcgtaccgaaaaattcggcaaaatacttcattaaccaagtatgttccataatagatactttcttctcctctagtagaaaaaataagtgaaaaatagtacaaccacaaattatactcttaactcgaaaaatagatatagttttttgtaaaaaagcaagaaaatagcattaaaaaacactaacttttaaatagttttaaattaattaaaaagatttactatttggctgcaatcatcacaattttctaattatccagcaactcaataaattagaccgttccaaatatgaacattatttaacaagccctagataatgccaaatctacttttgacaaataaatgcataatcattatattaatttcacaaatttggtatatagctttatatatacttaatatataactttaagcgctttcaaaatattgtggtactatacagttgttcacaattaatatgcataaaaggaaagagagtagcagttaatgagaacaatatatttggtgcgacatgggcaaactttgttcaatgtgcatcataaaatacaaggtacttgtgattctcctctgacggaattagggagagcgcaggcgacagcggtgcggcagtattttttgcaaaaagaaattagttttgatgccgcattttgctcaaagcaggaaagggcaagcgatactttagaaattataactgataatcaattgtcttatacgcgactgcgtgacctgcatgaaaaatctcatggtgaatatgaaggacaagatgaattcatgttgccatggcgacgtggctttagccgtattaatgccgcaatggagccggatcaacatgttgaagaaagaatggaacgagcgatcactaaaatcattgattcaacccatgccaacgatacaattttgattgttggacatgggacggctttaaggttatttacgcagcgagtaaatccaacttttaaagaatatgataattgcgggatagtaaaaatgtctgctgttgataataacttgaaatatttaagttatgtagcacccgctaaagatgtggttttaaataaagcagctaaaaacgaaatgttagttgtgcgttaacgaaaagagaacaagcatgaatagagataattatattttgtggtttgatcaattgcatcgcgatgatgttgatttagtcggtggtaagtcatcctcattaggtgagctgacttctgaaacgaatgtcccggttccgtatggttttgcgactactgccatagcttatcgccactttatgaattattctgatttaaatcaaaaaattgataaattattggccactttaactgatccagaagattctgagcaattgcatcgaatttgcaccaaaattagaaaattaattatagaagcgccgatgccaaatgatttagccttagaaattagctgtgcttacgatagcttagcccaaaagatgcaccaaaatgagccattcgttgctgtacgttctagtgcaactgccgaagacctgcctgatgctagttttgctggcgaacaagatacttatttaaatattcatggtcgtgagaatgttttgaaaaaggtgcaagaatgttacgcttctcttttcaccgaccgggcaacttattaccgaattaaacaaaactttccacaagaaaaagttgctttatcagctgcgattcaaatgatggccttttctaaagcagctggtgtgatgtttacagtcaatgtagcaactggtgatgacactaaggttatgattgaggcctcttggggactaggcgaatacgtggtgtctggaactgttacacctgataactatgtagttgataaaaatacgatgaagattgtacacaaaatggtgactaaaaagccaattgagttgatcagattgccatcgggaggaacaattgaacaaaaggtagcaccagatcaagtgaatgagcctgctttgactgatgcacaaatcattgaattagctggttatgctaaagaaattgaaaaacattatggctgctacatggatatggagtggtcacttgatcaaaatgataagttgtggttagttcaagcacgcccagaaactgtttggtcacaaaagaaaaagcaggagaaaaccgatgcaccacaagaagcaactacagaacaccgagtattgttaaaaggcttgccagcttcacctggttttgtctcaggcaaggtacatattattgatgatccaaaagatatcaatgaatttaagcagggcgaggttttggtcactctaatgacgtcgcctgattgggtgccagcaatgaaaaaggcggccgcaattattaccaataatggtggaatgacctgtcatgctgcaattgtatcacgtgaaatgcagataccttgtttagttggaacaactagccgtggacaagctgctacgaaaactttgaaaaacggcgagactgtcaccgtcgatgctaaaaatggtgtggtttatgctggagttgttaaagacgcggttaaaaaagtcgatgaaaagccagctgagcctgctgcagttgaatatttcccaccaactgcaaccagagttatgatgaacttaggagatcctgatcttgctgaaaaatatgcatctttgccagctgatgggattggtttaatgcgcgaagaatttttatggacgacttatattcaccagcatcccctttatttgattgaaactggtcatccagagagggtagttaacgagctagctaatggaatcggtaaagtcgcgcgggcaatggcaccacggccagtagttttacgtttttcagactttaagtctggcgaatatcgcaacttaaagggcggcgacaaatatgagccgcatgaaccagcagacctattaggctggcgcggtgcttctagatattatgatccaaaatatattaatgcttttaaattggaacttgaagcggtaaaaaaggtgcgcgatgagttcggattaaagaatttacatgtgatgattccattttgccgaacagtggatgaagcgcgcaaagtgacggaaatcatgcggacacaaggtttagttagaagcgcagacttcaaggtttacatgatggctgaaattccagctaatattattttggcggaccagttcaatcaatttattgatggttattcaattggttcaaatgacctaacgatgcttttactggggtgcgatcggaataatgatgtgattgctgatctttttgatgaaagaaatcttgccgtcaaaagggcgattagacacttgataaaggttgctcatcaagatggtaagacggtttcgatttgtggtcaagcaccatcagaatatccagaatttactgaatttttagtcagaagtggcattgattttgtatcagttaaccctgacatggtgaaggcgactaagctaaatgtagctcattatgagcagaggatcctccttgatcatgcaactggcttaggtaaaaaggatccaaatgaatataattggtaaaatttataatttgatgaaaagtctttgattgcagtattgcagtcaaaggcttttttagagttcaattttgtttttgggcaattttacatttaatttagtaaaagagtaaggttgaactaatgaaatttcgtaagcatctaaggctaatctctcactggcaaaatcagggttatataaaggatcgcctacaataggacttcctaaagaggcaaggtgaacgcgaatctggtgtgtacgaccagtttcaagcgtcaatttgacaatcgcagtattgtcatcatttttttgtaaaacttgataatgagtaactgctcttaatccagtaggatcgattttgcgtttgcgttgatcaagtggatcgtgaccaattggggcattaatcgtacctctttcagctaagtgatcagcattgataactttagctaaataatcgcggtgaaaaattttgctggttaattcacgatttaaaataggtacaactgcaggatttttagcaattaaaagtaaaccaccagttaacatatctaatcgatgaacaatatagggactctgaccaagataagtagtacaatcgttcagagcagtattggtttcatttagattagggtgcgttttttgcccttttttcttattaataattaaaagattatcatcttcatagataacatcgggcatcttaccgcttggtgcataagcctgttgatcactttcaacatgatccaagttaatttcaattttatcaccaggtaaaatgttttgattaaaatagcgatagttgccgttaactaaaatattttgttcaattcgcaaaaaatgacgccacttgcgagggattaaaagttgacgtagtacttcattgacagatgccggagcaagattttctgggtaaaaaagtgtaaaatggaaactcataataatttcttaagtctaatctagttataaacacgtgttttgatagtatggtacaattttcttgtttctaaaaaggagcaatatttaatgaataacgaccaaccaagaagaggtggctttaaagatgcttggcatcgatttgatagtcgcttctttatcggacgctggattattttaatcctgctcacattgatgctcttaacttgtacctattatacaattaaagttaagacatcaaacatagctaatttgaaggcctcgctttcaaccacaactacaatctatgactacaagggcaaaaaagcaggttctttatactcgcaaaagggatcatttgtggaatatgaccagatttcgcctaatattcaaaatgccgtaatttcgactgaagatcggactttttggaagaacccaggttttagtattaaaggcatggcgcgagatgctttaagtttagtgattcatcacggtcaagtaactggtggtggttcgaccttaactcagcagttagccaagaactcgcttttgacccagcagcagactttttcaagaaaattggaagaactcttttttgcaattgaaattaaccatgtttactccaaaaaagatattttaacgatgtacttgaataatgcttactttggtaacggagtttggggcgtgcaagatgcaagtcgtcgctattttggcaaaaacgcaagtgaacttaatccgagtgaagccgcaactttagctggaattttacgaaatcctagtttttataatccggttgatcacatgtcaaatgctttagcaagacgaaatttaatcttaaacttgatggtggataataataagttgacagcggctcaagctaaaatgtatcaaaagcaaggattaactttgcggaatacttttcaaaataaaaacggctatcgctatccttacttctttgatgctgtagttgacgaggcaatctctaaatatggcttaactgaagaacaagtcatgaataaggggcttaaaatttatactactttaaatcaaaattatcagggtaaattgcaggatacttttgagcaaagctggcttttcccacaaaatggtagtgatggaactgaaagccaaggcgctagcgtggcaatggacccaagtactggtgctgttcgggcaatcatcggtggttgcggtaagcacgtcttccggggttacaatcgtgcaacgcagatgaagcggcagccagggtcatcaatcaagccgttggcagtatatgccccagctttacaaaatggctatcactatgactcgcaactatcgaacaagttgcagaaatttggtaaaaatggctatgaaccgcataatgtggataatggctattctaatacaattccaatgtatgaagctttagaacaaagtaaaaatgtgccagctgtttggctattggataagattggtgtaagtaaaggcgtgcaatctgttgaaaactttggaattaaggtaccaaagagtgaccgtaatttagcgcttgccttaggtggattatcttcaggtgtttcgccaattcagatggcacgtgcatattcagcttttgccaacaagggtaatttgcctaataattctttctttattaccaaaattactgatgcttcgggtaacgttttagccgaaaataataatccaagcagccaccacgttatttctgaaaatactgctaaagaaatgacgactatgatgctcggcgttttcactaatggtacaggacgctctgctcagccaaatggcttccgtgtagctgggaagactgggtcaactgaagtacctaactcatatggatttggtaccaaggaccagtggatcgtcggttatacgcctgacattgtacttgctacctgggttggttttgaccacactaacaagcaacactacatgcagggcatttctgaaacaggaattacgcgtttatataaggctgagatggaaggaattttgccgtacaccgcgcaaactgaattcacggagaaggcacctaaccagattgtgaagaataatggttctaatgatgactggactaatggattaggtgaaaaaattcaagatggactcggttctgcaggacagaaaatcaatgaatggtataatagccttaaaggcttatttggccaataaaatttaggaggactagatggttaacatttacgatgctgctaacaagttagcagaagatttgactcaaactgatcaatacaagaagttgcaagaagcaattaaagctgttgaagatgataaggatgcttcagctttattcaaaaagatggatgaattgcaaaataagatcatgcaagcacaacaagctggtcaaccactttcagctgaagatcaacaagcttacaaggacttaaatgatcaagttcaaaagaatgataaaattgtttcacttcttacgaatgaacagggtttgtacgatttgcttggtgaagtacaaaaagcttacactaagccaattaatgatctttatgaagatcttagaaattaatattcgcgatgaaatttattcactttgcggatgcgcacttagatagtccatttcgtgggctatcttttttgccatctgaggaatttaaccatatctatcaggcagctgatcagtcgctaaaaagaattgtcgacctagcattagctgaaaaagttgatttagttttaatagcaggggatacctttgatagcagtcagccgtcaccacgggctcaattgttttttgctgagcaagtgaagagattaactgatgcacaaattcaggtagtgatgatttttggtaatcatgaccacatgaagcaagaagatctgctagttagtcccagtccttactttaaattgttaggcaataatgaaacagtagagcaagctacttttactacggatgcgggttttaactatgacgtaatcggcttttcatatctgaataaccatatcactgaggataaaatcccagaattcccagcaaaaggaaaaaattatacttttggtttaatgcatgctcaagagaaatcagctactgctagtcagaatgtgtatgcaccgtttacagttgatgagttgcaaaacttgaattatgactattttgctttgggtcatattcatgcgagaaataatttaagtagtacgccgtggattgtttatccaggtaacattcaaggtcgccacattaatgagatgggagccaagggatgctatctaggtgagattgatgaaaatagtggtaagactactattgattttaaagaaacagggccaattttatggcaagggacaaaaattaatcttgaaggagctatcagtaaagctgacttacaagcgaaaattattgccaagcttgaatctggacaaaaaacgtactttagtttgacgattgctggtgctcaatatttgagtgccgaagaacgcgatttagttcaggatcctgatttttggcaaactatttctcaatcgctgccatttgcttctcagttagttgatgtgcgctttgttgtgaatactagtttaaagttaaatgacaatgaccaacaagccttccaagctgccaaagaagagttatttgcaccagctgaattcaagcaaattgttagtgactggcaaaaaaaggatccagaagctgctaaattagcggctgatccagactttattgcggcggttaagaatctaacagaagtaaaactaatgagtaaattgaaaggaattaaggatgagactgaaacaaattaagattattaactttgggcagttctcgaataaaaccttcgatttgcctagtgatcaaattaatgttttctttggtgccaatgaagctggtaaaagtacaacggtagcttttattaaacagatcttatttggctttcatttgagaagtaactcttcaccgttttttgaagattatacgccgctagctcatgttagtccgatgggcggtaatttagtttttactgcagctgatggtgaatacgaacttgagcgactctatgctaaaggtgacaagactaaaaagggaattttaaccgtcaaaaaagatggtcaagttgtacctgagagtgtattttttgatcagattcaaaatattgatggctctttttacgctgatagttttatttttaaccaagaaatgctgggtcaggttaacagtttaagtcaagaggatttgcttgagcgaatttattacttgggagcagcagattctagcaagttgctggaaatgcgcgacgattttgccaaagaaacgggtaagctttttaaaaagacaggtaaaaagcccgaagtaaaccgtctgcttaaggaaatgactgatcaacgtgataaattagcgcagactaaaaatgagtttaatgattatgaacagctgcaccaagattttgtacaaaaaagagcggcattaaacagacaaaaacaagatctggctgttttacaaaaacaagaacaagatttgcatgatttgcaaaaagaaatgggcaattatcagacgctgcttgatttgcaaaaacaggtcaaggatgtcgactttaatggtcaaaattatcaaaaagcccaagatattatggctcagggacgtaatttgcaaaagacgattcaatcggtagaagcgcagttgcagggcctgggtgaaaacgatcagtctgattttacgctagagaagaagctaatccagcagaagcctcaactcttgcagtggcaagcggaatatcgtaattgtttgcaaaaggctgaccaattgaagcaggagaaagagcaactattagctttgacacctgagttaaaaaatctactcaagttgacaccagagcaaattgaacaaatgcaggcagactatcaagctttgccaggtgctgtcaatgagcctgcttatgtaactactaatgacaagctttggtatgttatcggtgcagtgttagcggcattaggtgtagttcttttggtagcgttgggtacagttggtgtaattgcattaattactggactaattttcctagcagcaggatacttaaaaaatagtaaccaaaataagcaaaatgcggcagtattagaaaagcaaaagctggttgctcaaaaacgccaagctttccaaacaaaatatggattgaatcctgatacgctaaacttaaatagcttactaactaatctgaaccaatatcaaatcaaaaagaatgccgcacagactaataataagcaagtaactgttttgaatcagaatgtggctcaactggcctcaagtgtccaaaatgcattgaagcaaccgattgataatgactttagtcaagttttgaacggtttggacgaacttgagacacaaattagtgaaaaacaagaattgcttcaaagaaaatccagcttaactgcatcactaaagcaggacaagcaagatttgaaagaattgggtctgaaattacaggcactttttgcccaagctaatgtggaaaatatggcaggttacgatcagctttatcaagattcacttaatcaggctaaactgaagacgcagattgcggccttgaaggaatcgttaggcgatgatcttcaaccgctgcaaatgcagacaaattcaaccgaattagcagataaattaacggctttgactgaacaaattagtactaagaatgcagaaattaatgaacttcagagtcaagttgctcagttgcaagtgcagttagacaatttagctgattctactgcggtgtttaaggctaagcaggatttggctaatacagaaaccaattttgtccagagcagtaaagaatacttggctaacttgtttgcggcaaggtggatcagtcgctcgcttgacttggcatctaatgaacggttccccaagatgcttaaggcggctcaggaatacttagctttgctaacgggcggcagatatgttgggattaatttagataagaagctaacagtagtcagaagtgatggtaaaaagcgcgaagtaaaatacttgtcacgggggactgctgagcaattatactttgccttgaagttagcttttattgagcagatcaaggatgaaattaatttgccaatcttgattgatgattcgtttgtaaactttgatgatcagcgagtcagctatatcgatcagttattgcaaaagattagcgaaaacaatcaagttttaattttcacagctcaaaagaatttagttgatcagcttgggattgagccattaacttttacgaaaggaacacaggatgcttaagagattgttagattacaacgatggagaagaaatggacattgttgttttgattagaaactcacagttgcgtcataataaaaagaataagttgtttttagcgatgcaattcagtgatggctcaggcgagattcgcggtaattactgggatgctaacaatcaagatgcagcaactttttcaactgggacaatcgttgagttgaatggcaaaagagaagaatatcagggtcgcccccagattaggatctattctctgcgcgtggtcggtccacaagaaggctatgaattagatcaatttattaaatcagcgccggaaccagttaatgagatggaagctgaaattaataaatttgtgatgcagattgataatccgacctggacaaaaattgtgaagtatttacttcaaaaatggcatgatcgtttttatgatcatcctgctggtaaaagcaaccaccatgcggtccgcggaggtttagcttttcatactttatcgatgcttaaggatgccaaaggtttggctgataattatgagcaagtgaatagatcgctactttatgcgggatgtattttgcatgatatgggaaaagtactggaactttcaggttctgccgcaactcaatacacgactgaaggcaatttggttgggcatctggttttaattgatgaacaaattatgctggccgctcaggatatgaagatgaatctggagtcggaagatttactcttattgcggcatatggtgcttagtcaccatggccgctttgaatatggttcacccaaattgccggcattgctagaagcggaattattgcaccgaattgatgatttagatgctgcaatttatgcagtaacgaatgccctgcagcatacgcctaaaggcgagttcaccgagccactactgagtcaagatggcaagcgatattatcgaccgatgcacgattcagcgctagataacgcaaaacatttagaataagaaataagcatcactgcagttgatttgcagggatgcttattttgttgaaaaattgaactagagttttattataatttcatagtataataaatctaatttataggggagtaaaaaggatggatattgctgaaattactaaaatgattgaggcggttaaacaaataatagaaaagaatgattacattgatttgccgctatttcagaattctagtcaattaaggttaaaaggaaataattataattttatacttgatttgaatagaaaaggacatagacgtcctaaatgtacttttctattaagggaaaagagaaataaggaacagccattagttagagtagatattattggacgtcctcatcaaaatcctgttggagactttaaatggtcaaataaagtcattccttgtcctcatttgcatagagcggattttccaaaatatggtacatatgtagctgtaccacttttggaaaagaatgaaaattttcaattgagtcagaatgatttaaataacttgtgtgaatgcttgaagaagacattaaagtttttgaatgttgataatataaattcatataattttcgagaacaggaaagtttattttaaagaaaggggggagaacagttaaatatgtttgatgtagagaaaatgaagaaaatatattttgactggatagataaaaagattcaatttgtcccttctaaaaatcaggattatatgactatcactacaccttttttagatatgtacaatgattatatagaattagtgattgcacaaggaaatacatcaaaatatataattagtgatgatgggtatactattaatgagttagggttattagatattaatttaaacagaaaatctaaacgtagggactactttcaatcgattttgattaattttggtgtgaaaaatcagaataatgaattagtaattgaatttgatgacttagcccaatttccagatgcacaaaataggttaactcaatgtatgttgcaagcttttgatttattacagacttctaaaaatagtgttattaagtattttaaagaagatgtaacaaattattttattgataataatattccagtaggagaagatttgagtttactaggaaaaagcggacggaattctaagtttgatattgtggttggacgtacaagaaaaaaaccgcaacaagctattaaggtggtgaatacgcctattaattctaatatagctaaccctttatttagaattattgatgtacgagaaagccaacctaaaacagaattttcagttattgcgaacaatattaatagtcctgtttctagtgattttaagtctgcctttaagaactataatattcctgtttattcttggtcagaaagagagcaatggctttccaaatttaaattggcaatgtgatagttgattaaaggtgttgagctgaaattgtaaataatattagttctagcattaggcaatatggaacatttagaataagaaataagcatcactgcggttgatttgcagggatgcttattttgttttggtgaaaaattgtgtcaataattttttgaacaaagttattgacaaattagctgaagaataataacatgtttatacaattgaaaagcagagatgtttttggatagattagagacttgtctcctttctatttttttattgataaaaagttcaagaggtatacattgatttcctcttggacttttttgatgcattgaattgctaaagatgttataaaaattagggtagggaataaaaatgaaagcatcaaaaaaattaattttagtatcggcagctacgataatgttgactgtacctgttttagcaaataatcatttgtctaatccagttgttgccgcaagtcaagataatacacaaactactaaattaacgttctatattaaccacaatgcctatgtttacaatcatcaaggtaagcgtaccaagagcaagattaagaagggaaagttactaaaggtgactatattgaagcctaaggcaattactaacccaaatcaaagcaggtatttcttcaataatgtattagctggcaagtatttttcgttaccgacagtaagcatcaagaagacagactttgttaatattggcaaaaataaatatattaagccaggcaacattggtagaatctcgccaggaaaatatcaatatgcggatctgtcaactaaggaaattaaggtaattaccaaaaagactgctccagtaactaatcaaatagggatgccaattgctgctccaattaagaagggaactaagcttacagttgatcagaactattatcataatgttgacggcgctgatgattatttgagtagtctggaatattatcggattaaaggtactgataagtgggtcaacctacctgctatcaaaaagtcaactcggattatgccaaataattttgcattagctgcatctactgaagataattatgtcattgccggtaactcaacgtatctctataatattgacggtgaaatcgttgataagagttatttattgattccagatgttaatgttggcgttgatcgagctctttatatttggaacaagcaaactaaacaagctgatctatattatcatcttacggctaacaaaaaattggtctgggttccagctcttgatggaacaggcaagactggtactacgattaccagcaacggctcatatgctcaccaaactaaagatacagcaaatacttttgttaaagctagtgatgtgacaagtcaaaatccagttgcattaaaagttgataatacaccgagcgaagcacaagcagatgcaagtcaggccactgctagtgactatggtgagttgcaagccttagttgatcgagcaggtcaaattaaaaaatcgactttatatcgtttgactgaaaaagcacagcaagaaagatatgatttggccgttgataacgcacaaaagttattgactaacaagaatacttctattgcggcagttaagcaggctagttggcaaattaaatacgatcaaagtaaattagacggacaaaaagtttgggttaaaaacatgaataaactaactaaggcagaaaagtcttgggtagtttcattggctaattgtgatatccatggtgatttacaaaaagaatatgctggcttttataaaggtaaaattgcggtagtgacttataataaaaagactttcaagagtgaacttgtacgctacttgaagttgtctgattatgctactgataaataaaattaaagagctcaagaatgctttaatgatgaagcatcttgagccttttgatttttagtaaaaaaatatccaagactgaaatcttggatactcattggagctggaactgtgcttgatgaggcaactgctagaatggcgattgtttcaggagctagattcgttgttagcccatcttttaacgaaaatactgctaaggaatgcaatctgtatgcggttccttacatgcccggttgctttagtccaacggaaattcaatctgctttaacttatggtgctgacgtagtcaaaatcttcccaggttcaattgctggtaaaggcattatttctgaaattcatggacctttcccatatgttaatgtaatgccaagtggtggtgtatcattaggaaatatgcatgaatggtttgctagtggtgcctatgttgttggcgtaggtggcggattagttggacctgctaaaaatgatgattataaagctgtattgcataatgctcaagcttttcataatgaatttcaaagtattatttatgccaactcagctgttactaggaaggtgccagtgaaggcatagtttttttggggggaatatgacgcccccctatttaaaaaataaattaatgaaataaaaaaacgtcgaatccattcagattcggcgtttttgattaactaaatatatttgttacttagtagttgaaacgtatgatgataatacatccttcaagtcgctatccttgattgaaacgtcagccttcttcaaaacagtagcaataacgtctttcatagtagcttggtcttgagccattgatgcgtaaatttggtcatcgatagccttcttgtgatcagcaaacttacccttagctgggtggctgatcatcttgattacgtggtaaccagattgtgacttaactggagttgaagtaacttcaccagtcttaagcttgaatgctgcagtcttgaatgagctgtctaaagtagtgtcagttgagtcgaatgatggcaacttaccagccttgttcttagtagcagtatcaagtgagtacttcttagctaaaaccttgaagctcttgccatctttcaattgcttgatgatgctttgagcagttgacttcttagcaaccaagatgtgttgaacagttaccttaggttggtagctcttccaagcttgttgttcttgcttcttagtaactttcttaatgtgcttcaatgcttgttcagaaagaaggttagtcttaatgttttgcttgaagcttgaagcagtcataccgttttgttgtaaaacagcactaaattgtgagccgtattgcttcttgtagttgttgtattgcttgtcgactttcttttgagatacgtacttgccgtattgttgttccaaagcgcggttgataatcatattagccaaagttgacttaccggcttgtgacttcttcatttcatcgtagtattgttgttgagtaatcttaccgcccttgtaggaagcaacagtagccttagtgccgctattagaacaagcagcagttgataatgcaacgccagctacagctacgactgcagcaatttttttcatataactcttcataaaaataatatctccacatccttaaataagtaactgttcattaatataccataaaaaagggcgtttcgttttcaaattacgaattttcacagaaaaatcaaattttctttattttttcttagttctttgtgtcttgtgagttagtatctggcacgatgttttccaaatcttggttcaatttatcgctctttttttctatgcggttaacgataggttgaatatggtcggaataatgttcaacactatcattaatatcactaattgtacgttcagctgttggcatttgttcatttaattcttgactagcctttttagctttttgcaaggcagaattaaagcgttggctttcatgtttaattgcttcgaactcatcttttaatggcttgcctgggcgattaccattgctatctttcatacaggaaaaaactagcccagctgttgcaccaaaaactgtgcctaataagaaatgtttcatttttaacctctaaaattgtgccttaattttgttagcaacttcgttgtatttagcttcatcgtatttgtcagcgttgttgcgggtcatcagcttcaagccatcgccttcaaaacgaggaatgaagtgaatgtgtgagtgcataactacttgatttgcggccttaccattattagtagtaatgttcattgcagtaacattagggaaggctgccttaattgcattagcaatttcaggaatatattgtaaatagcgttgtgcgtcttccttggtgtagtcaaacaagttaacgatgtgcttttttggcaccattaaggtgtggcctgggttaacttgagaaatatctaagaaggccttaacatcgtcattttcaaaaacggtatagctaggaatttcaccgcggataattttgcagaataaacaatctttgtctaaattttccataataaaacctcatatccttgtactttagtttactattaaatccatgctatcataataaaggtataaattcagtaaagaaagataggaaaaatgacattaaaaattgaacatttaacgggaggctacacgggtgtcccggttattaaagatattaatttggaaattaagccgggtgaggcactaggcttgattgggctaaacggcgcggggaagtcaactacgattaaacatattttgggtttacttcgcccgcaaaagggtaagatcagcttgaacgatgttgtattgacgcggcaaccaactaagtttaagcgtgaagtagcttatattccagaaacaccgattttgtatccggaattgactttaaaggaacatttggagctaaccatgttgagttaccacttggatgaaaataaagcatggaaacgcgcacatgagctgcttaagatgttcagacttgatgacaagctagaatggctgccgattcacttctctaaggggatgcggcaaaaagtaatgattgtctctgcctttttagcagatactagtttgcttgtaattgatgaaccatttactggccttgatcctttggcagttgctaacttaatcgatttaataaaaaaagcaattgctgacaaaaagatggtcttaatgactactcacgttttagctgatgcacagcaagcgatttcgaattatgctgtgttaaaccgcggcacgatcgaagttgtggggagtttgcaagaaattcgtcagcactatggccttaagccagatgatccttttgacaagttataccttgctttgaatagagaggataatggcaatgcgtgagttagcgaatagaaggttgagcgagaatcttaaacaatcagtaaaatatttgacgctggtgtttaatgacttctttattttagcgttgatctttttgtttggggcgctgatgttctggtatgcccaagctatgcgcgtaattcccaataatctgtggttctataagccacttgtcggctttatcatgtggttgccattattagctggtcgattagttaccttattaaaagaggccgacatgcaatttctgtttacgcaagatgaacaaatgggtgaatatctgaagccgatgattcgttacagtatggtgctgccaacaattctgattgttttgcttggcggaattctgtttccgtttgcgacggtaaaggctggaatcccagtttggtcatatgtaatcctgattatcagcactgttttattaaaattgtgtatgttgctgattgaaaaagagagtttgtacttctactacaattatccgcaatggatattattagtggtaactctggcggctttgttgattggctcactaggatcatttatttatccaattgaagttgtagtattaatggtaattacgcattttggtactaaaaaagaaaagggcgtctttaactggcgctatgcgattaaaactgaacaagctagaaaagatcgcgtttattcaatcttcagtatgtttaccgatgtggcagaaaagcaagttacaatcaaacgcagaagatacctcgactttcttttaccaaaatcattggctaaggaaaatcctaatttgttcttgtatcggagatcacttttgcgtaatccagaatacttgaacttattagtcagaatgactgtctttgcaatcttggtatcgtggttagtgcaagattggcgttgggcactaggcctttcatgcttggtaatctttttaacggtctatcaattattgccaatggcaacagaatttgaccgcaacttcatgtaccgcgtttacccaattgaacggcaaaatcgtggcagggacttggtaaaggtgttgacaatgggcttgtttattcaatggctcttgattagtgtctgctggttaattgtgctaccaattaatgttaacttgtttgaagcgatggcaattttacttggtttcactatgattgtaactgccacttacttgccaggcagagttaaaaaaatgaatcaaaaaaattttggaattagataggaatagagaatgagattaagaaataaaccttgggctgttaagcttgtaaacgaccatccagaaagtgttttgcaaaatcctgatcctgaaaaaaagatcgactggactgaacgatttggtaatgatcatcccatcgaaattgaagtaggttctggtaagggacatttcattactacgttagctgaacaaaatcctgataaaaattatgtcgcattagaattgcaaactacggctgcggggattatcttgcgaacaaagttggaaaagggcttggataatttacaaatcttacgcggggatgcggctgacatcaactgcttctttccagcaaatagcaccaatgttatctacttgaattttagcgatccatggccaaagactcgtcatgaaaagcgtcgtttgacttacaagagttttttgagcaagtatgaacaagttctgaagccagaaggacatattgaatttaaaaccgacaatgcgggcttgtatgcttactctgttcagagcttgaataattatggaatgaagtttgattttgtttcagttgatcttcatcatgaaaagccagagattgtggaaaagaatattgaaacagaatacgagcataaatttgcagctaagggtaatccaatttatgctttgcacgctcattttgaggatgaatagtttgaagcgtctagagttacagcagataaactctaggcgttttttaatgctttattggataaaatcttgctactagctcatcgctttagttattttgttttagaatagaactgtaagatttcagattattggagggaaaattatggaagatacgcgtggtgctagttaaatcgttctagacaataagccaaattataagctaaaattgcaatttccaaccggctttgaaagcctatcagactacgtgctcgattgttctcggcattgtaataggtcagaagcgaaaagtcgctttcaattgttctgcgaatagccatcaattgatgatcattgtgctttttagctcctgtcatatttttacgatatggtgtccaaagttcgtaacccatttgttttagctgttgatgcagttctttgcctaaatagccttcgtcgccaagaagatagtaattagatggatgggtattttctatcagttcaactgtctccctggcatcatgaactgatgcttttgttacgacataatcaagaatgtaaccgtcatcgctaacaatgacatgaactttgaaaccatagaagtaaattttcttggtggccttataaccaatgttggcataaccgcgaaaaattttagcacgatagttgcgaattggttggcaaacaggtaccggaaagctgtcaatgatcaagaactgtccattcaggtcaacctttttattcatttcttgccgtatctgataaatcaattgcaatagctgacgtgaacgtcgattaaaacgtgagtgtgataaacaattgaaacattcacagaatcttctttgtgattcaattcctgtcttagcttgccagataagtaaagccaaaatcagactgtccgtagttttaatttgatcaatatttcgccgatgagtaaactcagccggtgcatacaaacgataccagtgccgacaaattatcactaaatctttaaaactaacttgtaaatggtggctaaaacgcttaagcttaaggcagttcaatcagatcagactcttttctattattactatttacaagtcgagtctaacaagattggacttttttattaactaaaacgatttaactagcaccacgcgtatggaagataaaccttattatgaacaagaatatcacgaacctaaaactgatattcctagaccaacttttggacaagcattcaaacttttgtttactgcaccatttaagtagaatgcacgtagtactcgtcgtggattttggtatgcctatgtttgggcaattattttgctagtcattttagcagcatgttcagctacggcatattcaattgatggcattgcttattaaagtaatgaattcttcttattaacgcacgtttcaactggtacacttattattcaaataattatctatctactgattatttggatcttattgggcttacttggctttaccataagaagattgcatgatactgaccacaccggttggtggtactggatctcggttattccatttggttatttgtttttactttacttcatggttttgccaactgttgaaaaaccagttcgttggggcagttatctatttaaagaaaagaaataattgtaagactcaatttctagctttttagttaaagaatggttataataatatcaacttataaaaagtaagaaatgcatgaggtgtgaaaaatggaaaagattaaagaattaactgaagatcaattaaaggaaattactaaagaaggacgtactgtgcttgaattctcagctgattggtgcccagactgcaagtttcttgctccatttatgcctgaaattgaaaaagatttttctgatgcaaaattctacgaaattgaccgcgacggttcaattgacatagcaaaaaaattaatgattatgggaattccttcatttgttgtctaccaagatggcaaagaaattggtagactagtaaataaggaccgtaaaactaaagatgaagtggaaaactttttacgatcacttgactaatagaggagaataaaaaagcatgattactagtactaataaagaagcttatcctaacactttgatcgttatcttaggtcacgatgaaggccgtagctcatttgaggaaaaagaagacgttactcgcgtaactaacgatgaaggcaagaccattggttacaacttcttcaacgttgataagttagttgactttgataagttaccaaatggtccagttaagttgtcagacgatgagcttgttgcactgaacaagaagcttgatgaagttggttttactgacaagttagcatatggcaagccaactttagtttatggctacgttaagacttgtgaaccacaccctgattcagatcacttgcacgtaactactgttgaggttgctgatggtgaagaaccccaaatcgtttgtggtgcaccaaatatcgctcaaggtcaaaaagtagttgttgcacttccaggtactttaatgccaaatggtgcacaaatttggccaggtgaattgcgcggtgttgattcatacggcatgatttgttcagctcgtgaattaggtttgccacacgcaccacaaaagcgcgggatcatggttgttcctgatagcttcgaagttggtgcagaatttgaaccaactaagtgtgatgaattgattgctagtggtgaaattactttataattttaaataaattagaaaaactccttagttacgaaaactagggagttttttggttagctctgccacaatttaccatctggagcaaggttgaatgagccaagtttttttgatattaatttattgctaagatctttgctacaagtatagtaaacgtatttaatgaaatcgccattgtcgttatagcgttcttcataatcactcaaatatagctgatgatttttcatgaacagtggaatctgatcttcagtataggtgattgcaaatttgtctggaaaataccctttaactgtgcagcctttggtatctgtcccttgatcgttatcactgactaattgcacactgtcgtcgctggaaattaaacgtaaattatgcaaattaacagcatttaacgaacaagtgaaaataacttttgcttctttttctggttgatatttaaaaatatgcaattcatttgatttagtatttacttgagtaaaatagaaaaagccatcattaaaaattggttcgccgtagcacacgttaggttggactgaaaatggtgaaaaagccttactggtcttttgatcaaagaagattaagcgattaccaggataaatgcgagtttgccaataatcgtcacgcagatcttcaaattgtacataatcagaaatcgttacccaatattgatcttgaccggctaatggtctttgatcacaccaataaggcaagatgaaactatcattaactttttgccatttatcattagagagcaaaatgatatttccttgcatgtcgcttagaatattatcatcgaagtccttgatgataattcgatcagggacatgttcatagtcattatctgaataaaaatcgctatcttgttcaaaatagagtttagtgtcattaatgaagagcaaagtttgatctggttcgttaactactgaagatttttgtgggtaataaaagtcgatgttatcatcaaaagaagcaatccagacgtgtgccttatcgtaaaccaatgataaattataagtgtgtaaaccagtaagtggcatttgatggatgatttcaggttcttgtccaggtaaatacttaaataaggttagttgatcttgtttaagtaatgcatgtagaaaatagaaataaccatattgatagatcacgctaaagaaaaattgattttctttacttgaaattggttcaaatttttgtccagtttgaaagtcaaagaagactaactgattgcctggaaagggatgcttttgccagtatttttcagtagttaaatcgtaaatatcgattgcactatcctgacaatcgacaccgtagcgtgattgtccttgaatgattgttaaatcattgccggttacaggagaaaatttatcgaatttcattgatgcgtacctttctgtaatttttcaaaattatatcacagaaacaatggtaaaatagttaacgaataaaaacgttgaaatttcgagggacaaataatgttagataaaaataaacaaatttggttcattggtatcaaaggtacagggatggcatcccttgccttgcttttacatgacttaggttatgacgtagcaggtagcgatattgaaaaatacacctttactcaagtgccacttgaaaaggtagggattgatgtcaaaaactttaacccagataacatcaagagtaacgaagaacaagtaattgttaagggaaatgcctttaaagaagataacccagaagttaaagcttgtttggacaaagatgtcaaatggcaatcttacccagatactgttgaagaaattgtccaaatgcatacttcaattggtatttcaggaactcatggcaagacttcaactactagtctcttatcacatgtattaggtgaagttgccccaacttcttacttaatcggcgatggtcgcggcaaaggtgtggcagattcgcgtttctttgtttatgaagccgatgaatatcgtcgtcactttttggcatatcatccagattaccaaatcatgactaatattgactttgatcatccagattactttaaagaccaagctgattacaccagtgcttttcaatcagcagctgatcaaactaagaaggcgctctttgtttggggcgatgacaaacgtttgcaaagtttgaagactgacattcctaagtacacttatggcttcaaggataccgatgacttccaagcagttgacattaagaagtccactactggttctaagttccatgttttagcacatggtaaagatttaggtgaatttgaaattcacttatttggtgatcacagcatcttgaactcaactgctgttattgcggttgcttacactgaaaaagtgccgatggatgacattcgtgaagggatgttgacctttaagggtgctaagcggagatttagtgaaaaagactttggcgatattgcagtaatcgatgattatgctcaccacccaaccgaaatgcgtgcaactattcaagctgctcgtcaaaagttcccagataaaaagttggttgttgttttccaaccacatactttctcaagaactaagaagtatcaaaaagacttcgaagaaatcttgcgtgacgttgataaagcttacgtaactccaatctatgcttcagctcgtgaagctaacggtgatatttcaagtgaagacttggttaagaatattcctggctcagaagtaattgacttagacaatattgctgacttgactaagaataagaattcagtcattgtctttatgggtgcaggtgatattcctaaatatgaagatgcttttgaaaagttgctttaattgaaagataagcatgaaaaaaactgttctcaataagagagcagtttttattttggctaatctttgattttatctttaagatccagactcttttcgtaaatgaagtaaccaatgatacaagtgattacatcactgactgcttgagcccaaacaataccatgataaccaaatacatctttcatgatttctagtgcgatgaaatagacaacgccttggcgaacgatggccatgataaacgctgcccatgcattaccaactgattggaagacggtagtgtaaactaaaatgataccaacgattggtgtggtaataatagtggcaattaacatataactaccagcgttgatgatatctggttgattcataaatagagcggtgactggacgagcaaataaaattaataatccgcctgaaattacagcataaacaatttgcacaagaatatcgaagtttagaattttctttaatcgtttccagtttttagcaccatagttgtaaccaattaaaggttgtgaaccaaaggcaaaaccaacgattaccaagataacgatactgtaaatcttttgggtgattcccattgcggcaactttgtttgcaccgtatagggctaaagatgagttaagaagtgccataccaaagctttgagcgaagttggtgattgaaccggggatgccgattgctacgatatctttgattgttttgccgctaattttgctatattttagctttaatttgatgtagtcagttttgtataaaacgtagtaaatgagaatagcatcagtgactagataacctgtaacgttggcaatcccaacaccgattgcacccattttgaaaacaaacaagaaaataggatcaaggatgatagctaaaatggttcccgtcattgtagcaaccattgcttgggtagctaaaccttctgttctgattaagttctgcggaatgattgagaagataattggcgcagcaccaattgatattacacgataaaaatcggcagcatcttgataggtggcagcttttgctcctaaaagatgaaggatcggattttccaaaattagtaaaatggctgttagtattaaaccagtaacaaatccaccgatcatacaaaaactgcttacacgtttacttaattgataatttctttcaccgaatagccgtgaaattagtgaagatccaccgagcccaaaaatgtcagaaacagcgattaaaaaagtaaaaagtggagcaccaatcgtaattcctgctactagatttgtatcacccgttttagcaacaaacatcgtgtctgccaagttgtagatcatggtagtgatcatccctaagacgaccggtaatgctagcttaaagtagacctttttaatcggcgctttagcaaataattcatccataaattttcccccacattgaaaaaagcgacctagaaagatactttgaggtaaacctcactattctaggtcgctacgttatatcatttatttaattttagcatattgtgttaatttgtgaggtgattatctaaattaaagttaccttgaaattcatcagtagtgctttcttgatccataccatattcagcatcgtcgccccagtaaatgtattgtgcatttttgcccttggtaccggcaattctgaagtaaagtgcagcgctgtcgcctttaccagtggtcttggtggcatctaccttaactttttgaccaatcttgagcaacttgctagttgacttgagcttattatttaaaacgtggatcttgtttaaaatagtggctgtagtggtgctagaagcttggtaaagagtgttgccgttaacaaaaccaacatttgaagcataaatataagcaccgttgcctaaagcagaaaatggcttgcccttgatagtggttgtattcaaacttctcttcttagatccgctaagatttgcaaagtagaaaaatacgtcattcttagttgtggcgtggattttagctggcgttttaactagcatatatttaggaataagcgacataccgttgaaagtagtgcggtgaccgtttttatcataaatgcgagagttggaactcaagattaaaacattttgcccatccattgagctaacattcaaagatttgatgtagcgttttttaccgatgttaacgtaagaagcggtagtgtagtggtagttcttagaagtttttgcatctacttttttaccttggatcaggataggtttgccataatatttaaaacttgagcctgatttaaccgttgaagcaacagtcatcttcttgccattgactttttgggtagtggtagtggcattgcctttgctgttgaagacttgaactgtgccgttaaaggatttcttgagagtaactttacctttttgtgattgcgtagctgcttgaactgtgtgaacaggttgattgataatggcagctgctggtgcaacactgattaataaagctgctgcgatagttgctaattttttagtagtcatattttgtctgctatataaaacatggaaatatgtagaagaatacgaatttcctacatatcagaaagatatatttttcctttctttgtttcatttactgtcgtcttcactagtattctgatattcaaaataggagtaatcacattgactagctcttacagcttaaggacctagcaagccctgtttattttctttattttgccaaagctaaaagatttaaaaccgcattttcatctcgatcattcttgtagccacactcataacagacatactcattatgtttggtaccatgctttttattgccctgcaaagtgatcttttcctcgccttttttgacataaccgcacgcagcacatctttgagttgatgggtatgttttatcagccgagattaattatttgccataccaatcacacttataagttagtattcgtctaaacttgctaaaaagtgatctctacattccttttgaagctacatgcgtcatcatcatttctttgactgccaaatcttcaattacaatttgatcgtaattattaacaagcttagtagtaaatttttgtaatagatcgttttgaatattagctgctttgcgataatctctttgcagtttggttctcactgcaaagtaattatttgattttgtagctaacttaccgttaacttctcttttacgtgccagcattctttgataatgcttaatacgcttataaagcttttgcaatttaacaggcaaaatattgatttgcccctcggtatagttaaagtggccaacattgacatcaactgctgtcttttgctgggttttagcttttagttcaatttcttcttcataaggaagagccgcataataattatctttttctttgaagacacttactactttgacttcatccatctttagagcttcatagcttcatagctttttaaatcaaaccaaggctcttttgaaatgcttcttgggcgatcaaggcgaagcttaccattaacgatcttagctctatcagttttaaagccttgtctgggagctttcttagatttaaaactaggtattccccaatcaggttgtgacttatcaaagaagttcttccaagcattagctaagtctttaatcgctaattgtaaacatctggcagacaaatcatattgccagtcggctttatttgcgactagttcatcacggactctgcgttcgttaggactgggattatctttttggtttaatgtatgagcttcatacattaattgccaagtttctaagcctttattccagcagtatcgacgatagtcgcatagagcatcaagatgcttttgcatggtcttattaacttttagcttaactacttgtgtcttgatcgtcatttaagtactcgcctctaatctttttcttgtactttcttaagccatatagtctgcatgaaaacacatgaattatacttatcagatcatcaaccagttctttatcaggactagtgtcaatattattcaaaacaattatttcagtcccatgctttttacataggttttcaaaccaatcatagccaaaacggataaatctatctttataagtaatataaattttatctattttgttgttcattacttcgtctagaagattattccatttttgccgtttatagtttaagccgctgccaatatcgcttatttcttcgtctaatacgataccttgtgcgttagcgtattgtcgaatatggcttaattgatcttttaagtcatctttttgaccataagttgatactctggcataagcaacttgttttttatttgagcttagattatttttgctcaaatattgatatatttgatcttctgtatagaatctgcgattagtaggagagcgcttagctttaagaataccctttcgatcccatgtttggagggttctagtggttattcctaaacgatcagcgacatctttaggttttaaaattgtataatattcacttccatgtttaaatttctaatgaatattatggcaaatatttctattatattctataaatttccatattttgttaacagttaatcagctcctttgtaataatcccttaagttgattttagcacttatgagactataaaaataacctcgaaactcaaacgttttcggggttatttgattttattcacttaagtacttaggatcaataaatttattgatcacgttgttaaccttctttgaattatcgtacttgcggataatgttcaagaagtcttgtgcagttgcttgcttcaagtagtaagtttgatagtaatcgtgtaaagcatcgaagaacttggtttcgcccatggcaacctttaaaacagcagggaagtccatcccaagttcgtaagccatgtcttcagtgtcaacgccctttggtggattattaacagggtagttgatgtagttggccttttgattcttattaatgaattggttagcattttcttttaagatcttgttagcacgcttgacgttcttacgagtatagaacttgctgtgcatcagtttagcacagtaggccttattcttagtgtaggtcaaatcgtaaacgccattttcaaggaggttggtaagaccttcgtcaagccaaggttccatgtattcgtcgctgccgacagtgccgtagaaccattggtgaccaacttcgtgagaaacatcttcagttaattcattatatctatcaagtgggtgcttcttttgtaaaaagccgctggcatcgatcatgatcaagccaggatattccatcccacaggtatctttgccaagcaagcctttagtaatatcgatttctttgtaaggatatttgccgatctttttggtaaaaatgtgaaaactgtcttgggcagtcatcaaagcaagcttgttgtattgcttgctgtttttgcttgcaaggtagtagtcgttgattcttacgccgtttgcataagcgtggtcaaccttgaacttgttggaagcagcgattgcgaactcacgcatgttgttggcggtaattgtagttttgccatttttggttgtgctttgaccagaagcggcaactttgtagctctttggtgcgaagaagctaacgtggaaattgcttacagcactgttgcggttttcaccagcatcgtagtatgggtgataattccacttaccgtttcacggtcatgttgtaatttgttgccttgatcgtaagatcagccgcagcttgaacttttgagttgaagttaaataatgccgtaatggttactgcactcgacaataaaagtgttgttcttcttttcataattttccatccaagaaaaatttactctaaattattggaaattatcggcataaagtaaatctattttttgatgataggatataatttatgtataagtgaaaatgaatagatataaagaaagaagataaataagaatggttaaaagtattacacctcatttggtttatcacttgaatgggatgcaccatgttgtagcacaagttggtgtagtaaatggtgatcatgtttttgccttgcaacttcttcacagtgcacatgatgtgttggtttatagaaaacatgaaggtttaaccaagaacatcgattatactgatccacacttagtaatgatgggctttggccacacgcaaacctgggtaccagctaatgacaaggatgaatatttcgtaggtgctaaaccaaattcaggcaactggactactcaaattgcacgagtaaagtacccaagacttttaccagaaagatatacttcaaatacacaacttccacgtttgtcacacttgaatcacgtaaccgacgttccttatgatggtcatgatcacttgcacagagtagaagcttcagtttcaccaaatggcaagtatttcatgattgcctcaatttgggatgatggttcaggtcactttggtttgtttgacttaaatgaagtaaaccaaaagttgaatgaaaatggcactaagaacacgccaatcactgatttacattgcttgagtgctttccacatcgacaacttcgataatccaagtgttgctccagatgaagaaatgctacaaatgattgattcagttcaaggctatgctattgatgatgacaagaatatctatatttctaaccaattgtcaccaaagattaaccatgaaactggtgaagtaactacttggtcacgtaagattgttaagttcccatggggtgaaacaaacagtgataactggcaagtagctatggttgatggtattgatttaccagatcgttacagtgaaatggaaagtatccatgttaatgccgcaaatgatatttacttaactgtggcttaccaccaaaagtacattaagggtggagaatataagttaagaactttggaaaaccaaattttccatattactgatttgtagaataataaaaatttaaccaagtaaaaaagtgctgatgtgtctttgcttatgaagactatcagcactttttattcatattaatcagtaattctttctttaccaacagcacgttgttcggaaggattataacctaactcttcaatttcttgtcttttttctttgttattgatttgagaaagaatatcccaaaagttagacttatttttcttaatttttgaatttctgttagttttcattgttgttgccttcattttcactttctataaatataagtatactctgaaaaccaaatctatttttagctattaagatcgattaattcaaaatgaaatattttacaaaaatatatgcaatttatatgtaaatgatatacaatagtatcaaattcagaaaggagtaaaaattatggcagaaaaaacaacaggactttatgtcagaatgaatccagaaaagaaggaaaaggcagaagctattctgaaaaagctggggttaaattcagctacggcaattaacatgttctatgatcagattattcttcataatggtattcctttcagagtagagattccgaatgcatgggataatttagatcaaatgaataagtatgaatacgccaaactgcttggcgagcgcctgaacacattgagcggaaggaaagatttgcttggagatgtcgccaagaggcttgatgcggaaaagaatgaaaagaaagacaactaagttttgaggtaaaaattatgatggcaagaattattattggcattattgttgttttagttattgtgtatgtttgttgtggttttagaatcgttccacaaaataatgaaggtttggttgaaaccttgggtaagtattctaagacagtaaaagctggatttatctttgtctggccacttttccaaagaattcgcaaagttccattagcacttcaaccacttgaaatttctaagtactcaatcattaccaaagataacgctgaaatttccactagtttaactttgaactacttggtcactgattcataccgttacttttacaacaacaccgactcagttgaatcaatggtgcaattaatccgtggtcacttgcgtgacattattggtcgtatggatttgaacgcagcccttggctcaactaaggaaattaacgatcaacttttcactgcaactggtgacctgactgatatctacggtatcaaggtcgttcgtgtcaacgttgatgaacttttaccaagtgctgaaattcaacgtgccatggacaaacaacttactgccgaccgtgaaaagactgccgcaattgctaaggccgaaggtgaagctcgtaccattgaaatgaccactaaggctaagaacgatgctttggttgctaccgctaaggccaacgctgaagctgttaagacgcaggctgatgccgatgcttatcgtgtacaaaagatgcaagaagctttgtcaaaggccggcgaaggatacttcagaaaccagagtttagacagcttcaaccaattagctcaaggtcctaacaacttaatcgtggttggcaaggatgaaatgactgacttgggtaaggttcccgctttgaaaaaggtgtgggatgcaagcgacgataagaaagatgaataaaaattagctcaattctcaaatgaggattgagcttttttatacttttaacgtataccagcatcaatattaagtaattttcacactctcttgctcgccttatacttgtagtaacaattgagaacaagaggggaaagaaaattatgtttggtcgtacttattcagatttaggtccagttgttggacaaattaatggtgaagatattcgcgcaaatcaattagaaagacgtggctatgattgggaaaatggttatggcactccatccgatggccaagatactaatcgtgatggtcaaccagttagaaaattaactaaagatgccaaaagcattattatcttttggtcgtgttccggttcaactaagttgctcgcaagtaaagttgcgtgtgaaaccggtgctgatattttagaaattactttaagaaatccttatccagcaaattaccgtaaaacgctcaatcgcgctaactgtgaaagaattcaaaatgattcatcagagcttgagatgcagttacccgatttgagtcaatatgacacaatttacttaggctatcaaacttggacaatgactttgagtcagccaatgaaggcattcctacttgaatatggtggcgaattttctaacaaggagattgcgccattcctttctgaaggtggatatggttcgggtgatagtactgaattgatccgtgagtttattgcacgtgatggtggtaaaaataaaaaggtcgattggacatttgttggtccagaaaatgtcctttgtgctggcattactgataaatttgaaaaggcaggacaaaagattttcggccctaaccaaagaacggcacaattagaaggttcaaaggattatgctctgcgctttatgaacaaatatgatgttccaactgctcgccatgaaactttcaccagcgctgaaacctgtattgccgggttaaaggattttgcatatccggtggtgatcaaggaagatggtttagctggtggcaagggcgtaaccattgctaagaatcaagacgtcgctgaagaaacgatcagagaaatgtttgcatgtggccaaactgctgtcgtgcttgaagaatgcttggttggtccagaatactcaatgtttgtggctgtttctgaagatcaatttaccattttgccaatggcgcaagaccacaagcgagttggcgatggtgataagggtcctaacaccggcggtatgggctcatattctcctttgccacagttgaaaaaagaagatcgtcaaagaatgatcgatgagatcgtgaagccaacgatgaatggcctggttcaaggcgattatcactattgcggtgttttatacatcggcttgatgatgacagaaaatggcccaaaggtcattgaatataatgtccgcttgggcgatcctgaaactcaagttgttttgcctcgaattaaaaatgattttgccatggtgattgacgcagcggtaaatcatgaaaaattgcctgagattgaagaaaatgataattctatcttgggcgtggttgtctgcagtaaaggctatccagcgcacccggcacctaacgtgaagatcggcaagttgccagaaggtaccaatacctatatcgattatgccaatgtgaaaggcgaattggataatctgataggtgatggtggtcgcttgttcatggtgatttcggaagctgacaatttagtccaggcgcaagataatgtgtactcttatttgagtaagcttgatctgccagattgcttttaccgtcatgatattggtaatcgtgctttgagagattagatgtgtgaagaaagtcccggttggggcttttttagtttggtttaatacgaacgcttggtcgtatttgatgggatcaatgataaaattttctccacataagtggaggttttgaggatcagtcgtctaacgggcaagacaggcttagttaataagcaagatatgggtccaattcccgtcgtccttaatatttgaataaagtaaaagctcttagttgtgaaaactaagggctttttcgttgtgtgtcgggcatggcatttgtctagtctagtgaaagtctagatcacgggtagttgtcgccaagtgtagcgaaccacaagccgttagcggtgacgctatgggtgaaggaagtggctagcgagttttccgagcctacgtacagaaacctggtcaggccaaatggtggatgagactgcagcacaagttaaagtccaaaggacaaccgtaaaaccaagacggtaaaccagggggcagtggaaaattaaagatgaatgtcttaccccgagagatctcgtggacaggtgaaaccgagtaagctttaatatcagcgatcgtaagcctggtcgaaaaaggttaatcgcgagaagtcagctgaggtcgtagtagtgctgaaggttttgtaatgaaactggagcgaagggcctaatgtttgtaagagcatatctcgctataagcaatgttcagacagtccggataagaggatagcctagcacaaagagaacgtaactctttgatggtgaaagcaattgggacaattctgaataaatttacaagtagaaatggagatatcacgagatggaactaattgaacagattttaagtcaaaataatctcaaggaagcaatcaggagagtcaaaatcaataagggagcgcctggtgtagacaggagaacagttgatgagcttgatagctattttaaaaagcatcaagtagaaataaaggacgccatcatgaagatgaagtatcgtccgcaagctgttcgcagagtctacattcctaaagctaatggtaagaaacgtcctttaggaatacccacggttgttgaccgagtaatccagcaggctattgcccaagtattaatgaagatctatgatcctcattttagtgagcatagctatggctttagacctggacgcagtgctcatgacgctattgaacaagtcttggaatatttaaacgaaggctatcaatgggttgttgacctggatattgagaaatactttgacacggtaaatcatgataaattaatttcaataattagagagcaagtaaatgacaaaaccaccctccatttaattcgagcctttcttaaagctggagtaatggaagatggttgggttaagcctaataaactaggtgtaccacaaggcggccctctttcaccaattctatccaatatctatttagataaaatggataaagaattggaacaaagaggcctgcgctttgtccgctatgccgatgactgcaatatctttgtcaaaagcggtaaatcagccaaacgtgtgatgaattcaatttcatcatggctagaaagaaagctattcctaaaggtcaacgcaaccaaaaccaaagttgtacgaccaaccaagagcaactttcttggctttaccttctggaaaagtggcgaatactggcaagcaaagccaggagatgaccgcaaaatcaagctttatgacaagatgagagaacttctctgtcgcagaaaagcagctgctcagcctctatcactagtctttactaagataaatcaagtagttagaggctgggtcaattactttagagttggcgacatgaaatattttctaattaagttcagtcaatggctgcgtcataaagtacgggtggtaatcattaaacaatggaaactaccaaaacgaatatacattaacttaatgcggattaacaaggcactaaagtgcaattttagtgatgaagatattcataaagtagctaatacgcgcttaggttggtataaaagaagtacgggtcatgtcattaactttctgcttagcccaaaagtattgggcataagcaaagcggatcgcccaggcttggtcgatccgctagaatattatttatctcgtaaataatcacaaacgtagcgccggatacggaaccgtacgtccggtgcaatgagaggggcgagttataaaactccctctactctattacctaaataatttcctataaaagatctaagtgttcattctgaagatttctaatttcattaggtgtatgaccatatttctttttaaagccattataaaatgaagtcttattagtaaatccaactcttcgataaagtacgtctattggaaatgatgtaaataataagtcatggtaaatgacagttagacgtttatccaataaaacgtcatgaaaggattgacctatattctgcttaaaaacggtgcctaagtaagaaggattataattcaattctttacctaattgtttcagtgaaatattcgtataatcttcagctattttgctaaatatttgttgagataacccttctaactgttgaggcttctttattttatgattcttcaatgctctttgaaattgacgattaagtacttggagtaaagatttgacagtttcaatattttggattaatctgtattttgcttataataaaagcaatggtaaatatttatttttagttacttaaacttcccacactaaataagccagtaatctcttgatcttgcttggctttaggcttctatattatttttgctagttttctttaacaatttttgcatgtatttgggtaaacgattgataaagtcagccgtgaattcagctatttgtgcttcactggcatgaaagacttgctttacgctggccagcattgcatcagtaatcaattgcaaggaatggctaaaagtaatgtccgccagctcatcaatcatgcaatagaacagctcgcctagcgtgcgttcatcttcatcgtcccgcttggcaactgacataagcatgtagcgagtaaaaactatggcaacatgagcggtcaaagcatcgtaagacaggccatgatattccgtacttagttttagataacttttgcaagttttgaaaaaaacctcaatatcccaacgcttgccgtagttgcggataatttcatcttcgctaagcgacatgtcggtacaaatgattgccagccaatccttgcgattggcacggtttctaacgcagacaatccgtgcatctattttagcaccgtctttgtcctggcgtccgactttgactgggattgacagcaggtagcgagaacggccgcatcgctttttacagctgcgataaatctgtttgatgtttttgcgttctccctcaaattcatatttgattttggagctcaccttaaccatggcaatcacatccagcttcctttgcttgagctggacgatttgatgtggatttgagaaccagctgtcaaacagcacgtacttggcttgatgacctgctttcatagcttggtcgattaaattaaccatcacgtctgtgcctttagtccgggcaagcatacgtctttggccagcaatggtgcgctgatcaaaaactttattttcgccaatcatattctgtagcttctgagaagacagcagcactgaattgattggcatgaaagaagctccatcagtccagcccagggtcatcatgcgaaaacctttcttgtaagtcattgatacatggtcaaaaactttggcgactaattctgttttcttgaagccggtcctagagaagtaggaatcatcgacaacaaagcaatcagcccgtttttctgaagtcaaagatcgcaagtggttattaatgatttgcgcagacagaagtgtggtgaagtggagccaattgacgtgaacgttgcgcataaaacggtaatatgagttcttggaaaaattttcttgaaaatgatccattttcagctgcatatataagctgcggtcacgaaagacattgcttaaaacgtaaagaaacaagctgaacaggctaatgcctttttccttgcggaagccacattttctcaacagcttgatcacctgaaacttcttgatgaagctgatgattgagtttgaaaatagttgttcattttgttggtcaggagatggtaaaatagacattggcacaagcctttcatgcaaataaattatgttttggtcaatataattatagcaatgaaaaggacttgtgccttttatatttgtcaaaacacgcagaatcacaatgaaacaagcaattttgcgtgtgggaagtttaagtagttaatgaaaggcccaaaaaatatgttatctaaaagaaattatcaagaacatcttcggaagatggcgccaaaaaaagagcgtttttctattagaaaattttctgttggagcagcgtctgttttaattggatttacttttgtgagtatggctggaagtcacaaagttcaagctgcagacgtacctgataaatctgtagtagttgacactttcaataaagataagagtcaagagctaacagaaaataagactattgaaatgccaaaagcagaaaaaacggctgttagttctgtagtacaaaaaggtgcctctgcaaataaaattgaagcagaaaatactacacaagttgataaaaatacagaaggttctgtaaaggtacaagaaaataaagacgcagtacaacctaagactgttaataatgaaaatgtattaaatgtatcaaaagcacagtctcaatctaatgaagctgtaactaagaatgcagcagaatcaaaagtagcagcactacgtgcttttagagcagcacctcaagctactcaatcacaagatgccaaggatttccaaagcttagttaatgccatgaatgatagtagcattggaactattaatattaccaatgatattactattaccggtaaagttaacggccttactacttctggtataagtgatataaacaagcactacctttatctgcagtctaaaggttcagctcgtgacttaacaattaatggtaatggtcacactatcaactttgccggttacagtattgctttacaagacgagaactaccacaatgctgctggcccttggaacattactttaaaggatatgacgattgagggtagtaagtatggctattcaccaatttcattctatagcagcaagactaatactgaaaatagtaaattaatttttgatggtgtcactgctaacttgaatgatcgtccattagttgacaagtatggtgaaaacttaccagttcactttgccggtgataacaacattatgcttaataatatgtcaattggttacaatctagtaactggtaagactgtaaaatttgactctggtaatactacttttaatgttggtggtaaagtaactggaaatgctattaatcctgacaactgggtaattcgttcaactgaaaatgctagtaatagtgaaaatccttcaactttaattaatgaaggtgcaactgttactattaatgctaaatcagacgacttacgtggtatttatgctgggcgtcaactaacagctggtcagccaatctatggcgttactgttattaatggtactttgaatgccaacatggcagctggtcactcaactgcaatttggtcacatgatcttgaaattggtaaaaagggtaatgtaactatccataccaagcaaacaaatcaggctgatggtgttgaaaatggtacttctaattcagtaactaattataatggtacccactatgctccaatttcattaggtgttggtccaataagtagtgttgccagtccattatctaagcaaactgccagcttaattaacaatggtagtttgactattatacgtgatactactgaaaggacattggtaccattaatttcaatgggtgacggtggtttaagtactaataccacgttgaaatttggggttagtgccggtgctactctcgatttacaagacaatgcaggtacatttcaaaatggtactgaacctaacacaccattgaatggtttgattactatgtggggtacgagtggtacagatttattggaatttcttaccccagcatatgtcaacttacaacgtactggtaatattcgtggtacattgattagaatggaaggtgtctacaacagtactactgttaatggaccaacaccagtggctcaatgggatcaaggtaataagactactattcctaatgatgtttggtatgtaagatacctgatatctgcgaaccaatggggtaataactctggtcaatttatgagtaaagatcaacatcctaatactgtcgttgcgcagaaaggtgttgatacactttataactctaatgctactgtcttaatgtctaagaaccaaggcgctgataaatacgaaaacggtacaatgccaactgaagtacaacaggcacagcacttgaacagcttcttaaacaactttaacttgtggcgtccacaaagaatggctatgggtagcaagttgaatgatagtcctgacgttaagattgatgattttgataagtatcacccagaagtgcaaacgattgatggaactactcgtcaaacattaagtgatcttgatgctaataagggacttaaagatttaattggtcctgatgaacaaccaatcactgacttcaaggatattgttaagcatgttacttggtacaattctgcaactgataaggatgaatggaacaagatcatgatccagccgactgacagcaaggatccaagtgcccgagttccttatccaaaaccacaaaacccaacaggtaatttaaagactactgatggttttgcttgggctaaggtaacttatgctgatggttcagttgactttgttaagattccacttaaggttactgaaaagaagtatagtgaagaattaacaccatcttatcctggtgtttccgttgagcaaggtaagtctgatagcgtagatccaagctttaaggatgaaaacgataaggctgctgatgctccagcgggtactaagtacactgcaggtgaaaatactccagattggattaaagtagatcctgatactggtaaagtaactgtttcaccaactgatgatactagtgtaggttcacatgatatttctgtaacagtaacatacccagatagcagcactgaccaattaactgtaccagtaactgttaccgaaaagagtaacttagctgagaagtatccagttagctacgacaagttaaatgttgaaaagcctagcggcgacacaccagcaactggtgcagtagatccaaaggctgctgcagatatgccagaaggtgcaatcactggttacgaaaaaggtgactttgatgctccagcgggtgtaactatcgatgtaaatcatgatactggtaaggtaactgctagtgtaggtaaaaacgcaacattaggttcatttgaagttccagttaaagtaacttatagtgacggtacttatgctgaagtaaaagttcctgtaagtatcactggtaacaaggttgatccaggtagtggtgacgttgtttactacggtgatcaaagtatggtggtcttcaatggcaaccttactactgttcacaagactactgatagccatgaattaagtgctaaagacagtgccttccaaacaatcacatattactctgattggaacaagaaaggtaacatcgttagcgactataacaagcatgtgatttacaagctaagtgctgatggtactaagtatgtaaacgaagctgatgctacggacagctttgatgctagtgcaattagctttaactggcagaagggttatggagttaacactggtgttgataactttagcaatggttctgcagacacactttaccaacttgaaaatggtgctgttaactctgaagagcaaactgatgccaatgatccatcaggtttagcaggtaactctaagtatcgttacgactttagtattagtgatactaatgtattgcaaaaactaggtttatcacctgctggttacaatgcttgggctaatgtttactacaacttccttggtgcaactggtaaaattaatattccagtaaactatggcagtgaagtatcaactgatgaagctggtattaagaattacttagcaactaacagtatctcaggtaagacatttgtcaatggtaacccaactggtattaagtgggctgaaaatggtatgccaggtaaagatggcaaatttgctgcttctaacatgactgggattgttgaatttacttttgataacggtactaagttaaatgttcaagtaacatttaagactggatcacatgttccaacttcaggtagtaaagttaatgacgatactaacctttatgtagaacgtacaattgaatatgatgtaactggaactggtcattcaccaattaactcagtaacacaaaaggttcactatgtacgtgatggataccacaagattaatgctgatggtacagatgctggggaaattatctggaatgaatggaaactggctgatggtcaaactgctgaattcccagaatacagtgttgaccaaatcacaggctatgatgcatatatcaatggtgcaaaggctactcaagttgatgctgccaaagttgctgaaacaaatggcacaccacaaaatggtcaaaacatcacaaaaagcaaaatagtactccagtaccatacaaaccaggtaaagatggcgtaaacgatgccattaacagatatgtaactcgtacaatcatcgttaaggaaccaggtaaagaaccacaaactaatactcaaactgttcacttcactaataaagataaagatggtaatagtggctacaaggatccagtaacaggcgagattaaatacaatactgactggcatgtagcaagtgatttgaatgctaagactggtagctgggaagaatatacagcaccatcagtaacaggttacactccatcacaagctaaggtagaagcaaaaacagtaactgcagaaactgaagctgctagcgtaacaattagctacactaagaatgcagatattccggtaccatacaaaccaggtaaagatggcgtaaacgatgccattaacagatatgtaactcgtacaatcatcgttaaggaaccaggtaaagaaccacaaactaatactcaaactgttcacttcactaataaagataaagatggtaatagtggctacaaggatccagtaacaggcgagattaaatacaatactgactggcatgtagcaagtgatttgaatgctaagactggtagctgggaagaatatacagcaccatcagtaacaggttacactccatcacaagctaaggtagaagcaaaaacagtaactgcagaaactgaagctgctagcgtaacaattagctacactaagaatgcagatattccggtaccatacaaaccaggtaaagatggcgtaaacgatgccattaacagatatgtaactcgtactatcaatgtagttgatccagtaactggtaaaattagtacaagtgtacaaactgctaagtttactcgtgaagataaaaatggtaatagtggctacaaggatccagtaactggaaagacaactataaatccatggactccggctaaacagggactacgtgctgttaatgttgagcaaatcaatggttatgtagctaaagttgatggtaatgtggacgcagtagttgtaactcctgattcagctaatatggtagtaactattacttaccaagctaataaaccagaaggtcaaaacattgctgttaagaaagatacagtaccagatccagcagatggtattaagaataaggatgacttaccagatggtactaagtacacatgggggaagactccagatgtaagtaagccaggtgatgtaccagcaatagtagtagtaacttatccagacggttcaaaggacaaggtagatgttcatattgttgtggataacccaaccccagagccacaagatgttcacactactccaggtgtagtaccagacccatcaacagccatcaagaataaagatgagatgccagatggcactaagtacacatggaaagaagttccagatgttaactctgtaggtgagaagactggtatagtaactgtaaccttcccagatggcacatcagtagatgttaaggttaatgtatttgttgatcctgttaaggaaaataacaatacaattgcagattcaaacaatactaattcttctgataagaatactgcaaatgctgcaacagttaatggtaagtcagaaaacaagaagactttgccacagactggttctaagtcagatgccgctgcaattgtcggtttagcagttgccatcgcaggtagcttattaggcttaggtgttaacagaaagaaacgtcaaaagtagaagaactatttataattgatccaaagaagtgtctgggaaaaaactaagtctcagatcatgaaaaaagaacgttgaatttttgtttcaacgctctttttgtatacttttagctccagccttgatattattaaatcatcacaaaataaaaaaggtggaaactaacatgtacaagaattatatcacaggtcaaactgctttaacacttaatctagattttgccattccggccaatcatttggctaatgtcatcagctggtttgtagattcaattccagaagatgttttagtaggcaagactgctaaaacgggccgcccagcctatcatccagccatgatgctcaaaatactgctttttgcttactccagaagagttttttctggcagaaagattgagttgatgctggaagaaaatctgccaatgatgatcttggctgaccagcaaaagatttcatatcatactatcaataattttagatcaagcagccatgccaatgaactgattaaaaagagctttatctacttcactaacctgttagaagatgaaggcttaatcaatgaaggtgctgcttttatcgatggtactaagattgaagctgatgctaaccgctatacatttgtctggcgcaaagcggttgaaaagtatcatgaaaagctgaaaggccaggcagttgaactttatgatgaattgattactaaagaagtagtcaaagaaatggaaaaagaaaaagttcaaactagtcaggggctaaaggaattagctcaagaaactgaagcagaaattaacaagctgactaaagagattgagcaggaaaacaaagccattcctggcggttcacctcgaaaagccaagcgacgtggactaaaaaagattctgcaccggctaagaaaagattatgtgccaagaatgcaaaaatatgaagaagccgaagagatctttgccggacgcaacagttattccaaaacagatcatgacgccacctttatgcatatgaaggaagaccacatgaaaaatggtcaattaaagcctggctacaatattcaagcagtcacgaccgatcaatatgtagttgattatgccatctttcctaatccgacagatttcaaaactttggagccggttttggatcaaatgaccgtgttggacaagtttgacaaaatcgtcgccgatgctggctatggcagtgaatacaattattcgatgctggaggaaaaatatccagacaagaagtactttattccctacactatgtatgaaaaagaacagaccaaaaagtataagaatgatccaactaagctaatcaactggtactacaatgaaaaagatgattattacattgatcatcatggcgtcagattcaatttcaaatattacagccagcgcaaggatcgttctactggtcaggtccgtgattttaaggtttatgaggcagacgagttccagctaacgccagaattggaacaattggctaaaacagctagcggccgccagcgccaagttcgctataatcctaactggcaatatttaaaagaaaaagcaaaagaagttctccaaagcgaagaaggcagacacatctatggcatgagaaaatatgatgtagagccagttttcggacatttgaagaacgtatttggcatgcgcagaacgcacctgcgaggtaaagagaaggtcgaaaccgatatcggaattgcctttatgatgatgaatttgaacaaatattgtcaaagaaggtggctgaagggccgatttttattgttaaaaattttaaagagaacaaaaaaacgatcaagattcttaaaaaaggaaatcttgatcgtttttattcatctggaagctagttttttcccagacacttttttgtgccttaatttgttatttgatcatgtttaataatttttccgtaagcgtcgtaagcgtcatataaccgagtatcttttttagtccgtatttttcaggtattctaatctcatcaatttaatggaggttaagaatatgatcgaaaaacaacaacccattgtggcacttggccgttcttctaaacctaagaaggctcgtccaccacgcaataatctgttgcttagtttaaagaagaatgacttagagctgaatttttacagcagcttagaccctgaaattatgaataagctgcttgagaaagtcttgccatgattaagctcagtgacttagggcaagtctatatcgtttgcggcaagacggatctgcgtaaaggcattgatggactagcaactttagtcaaagaacagtttgaacttgatccttttagcggcaaagtcttcctcttttgcggcggaagcaaggaccgcttcaaagccctttattgggacggacaaggtttttggctgctctacaaaagatttgaaaatggaaaattgaactggcccaggaatcaaaatgaagttcaagctttatcttctgagcaggtcgactggctaatgaagggcttcgcaatcaatccaaaaataaagaacacgaaagcgtgcgaattctactaacacttgacatcgcacgcttttttgatattcttttaactaataaatttaggaggaagtttaactcatgtcacaagaaaatttggaaaagattattgcacaacaagcaactactattcaaaacttaactgatgaaattaagctcctccgtgaacaagtagcttacttaacgcaaaaacgttatggcaaatcttcagaacaaatgcctttaaatggacaaacaagtctctttgatgaacctgatgctcaagatgacggagaacgtccccgacgccgccgttcagactattacttataaaagacaagctcacaaacgaaagcgtgctgacttactagctgcccttccagctgaagaggttcaccatgaattaggcgacaagcattgtcctgattgtcatcatgaactgattgagataggcaagcagtcagttcgccaagaattattgtttatcccagctcaacttaaaaggttagaccatatccaacatgcttacaaatgtaaatattgcagtcaaagaaatcttagcgacaagatcattaaagctgcagtacctaaagctcccctaaaccatggtctaggttcagcttcactcatcgctcattcactttatcaaaaatatgaaatgaaggtgccggactatcgtcaagaaagcgactggaagaagatgggactagaagtttcaagacagatgttaaattattgggatttgaaaagcagtcaatactactttaaaccagtgtatgatctgcttaagcaaaagctgttaatgcggccaattttacatgccgatgaaacttattatacagtcttagaaagtaaaacaatcaagacttactattgggtcttcctttcaggcaaacatgatcaatacgggattacactctatcatcatgatccttcccggagttgcaaggttgccttaaactttttaggaaactatcccggttatttgcactgtgatatgtggcaggcttatgagcaattgccgaaagcaactttagttggctgctgggctcatgttagaagaaagtttcacgaagccgtaccacaacaggcttctgaaaagtcccttgcccaaaaaggactcaactactgcaatcgcatgttttacttagaacaaacctgggagaatttgagcaaacaagaacgttaccagctaagacaagcaaagctcaagcctctgatgcaagagttcttcaattggtgtgagaaaaataaaatcaccgttttgccaggctctaaattgggaagagccattaattataccctcaagcatcaagctacttttgagcatgtcttgcttgatggcaatttagaattatctaacaataaggctgaacgcgctgtaaaatcactcgtcatgggccggaagaattggttattttctcaaagttttgagggtgctactgcaagtggctttattctaagcttaattgaaactgccaagagaaatggccttgatcctgaaaagtacttgaattatttgcttcagaaattaccgaatgaagagattctggattcggaaacccttgaagcttatttaccgtggcaagagaagatccagataaattgtaaataaaagaacttaaataaccgtctcagtataacagtaactgggacggtttttaagtacactattttatttgacgcttacaaaatatatagaagaagtagataaacaaatggaggcattaggtgagtttttctttataacaaattattcaggaattaaggttaagtgagtatggaagaagtatttaatgatggtatttacgaatgcatagtagtagcaaccacggtagaaaaatataaggtaacttccaaagttacaattattctacaaattagagatgatattgatgccgttgaattaaaaaaactaatagaatttatgctggatataggttaaaactagaatattggcaaaaaaagatttcgcatactttcaatattaataattttcaatatttgtgttatgcgtgtggccttccgagaccgtaaaatagtttgtgtaaggatgaattattccttaatttaatttcctaaaacattagaaaaaggagttcctttctcgtatgattggtttgaacaaaaaaaacatacagaaagaagaactccttcatgaagagactgtaaaatagtttgtgtaaggatgaatgattccttaaatttatttctttaaacattagaaaaaggagttcctttctcgtatgattggtttgaacaaaaaaacacatacagaaagaagaactccttcatgaatgattttaccaaagattttgctcaagctctattcaatccagacaaaataaatgatttattgcgcaaagagctacaacaggctgttaataacttgctagaagctgaattgactgcctttctgggctatgatccctatgccagaaatggctggaatactggcaactctagaaatggtgcttatttccgcaaagttgatacgcaatttggcccaattgaagtgcaagtgcctcgggatcgcaacggtcaatttcatcagcacacgctgcctgactacaagcagcactcggatatcttggaaagcatgattatcaagctttactccaagggcgtgaccaccagggaaatagccgatctaattgaaaagatgtatggcagccattacagtccagctcaggtatcaaatatttccaagcagatgattccaaaggttgaggcttaccacaaacgcaagctaagcgacaagtttttctgcgtctatttggatgcgacataccttcctttgcgccgagaaacatttgagcgtgaagcagtctatattgccattggcatcaagcctaatgggcacaaggaggtcattgactactgcattgcgcctagcgagaacattgaagtctggacagatatgcttcaaaacatgaaatcccgaggcttaaagcaagttgagctttttctttctgatggtgttgttggcatgaaaacagccttggccaggacttatcctaaagctcattttcaacgctgtttggttcatgtcatgcgcaatatctgcgctaaagtacgcgtcgacgatcgtgaaaagatcatgaacgaattcaaacaggtgcatcaacagacaaacaaagaagaagccacagctgtcctgcatgacttctataccaaatggggcaaggtttacagccatgttatcagaagcttgaaagacatagaaccagatctgctggtcttttataactatcccaagcagatcagagcttcaatttattcgactaacatgattgaatcatttaacaatgtgatcaagcgcaaagctaagcctaaggcatagtttccaactgaacagtcgcttgatgcttttattggcattcaggcaatgagctacaatgaccgttatttcaatcgaattcataaaggctttggtcaggttcaggacaccttagaatcctactttgattaaataaataattaaaaaatcaatttacgagaaagatctatttacacaaaagatttgacagtttcttcatgaatgattttaccaaaaatataactcaagctctattcaatcaagataaaattaatgatttgcttcgtcatgaaatccaacaagctgttaatgacatgttagaatctgaactgactgcctttttaggatatgatccctatgctagaaatggctggaatactggtaattctagaaatggtgcgtatttccgtaaaattgatacccagttgggatcaattgaggtacaagtgccacgagatcgcaatggtatgtttcatcaacacactctgccagactataaacaacatactgatctcttagaagatatggttataaagctttattctaaaggtgtaaccactagagaaatagctaatttgatcgaaaaaatgtatggcagtcattatagtccagctcaagtgtctaatatctctaagcaaatgattcctaaagttgaggcttatcacaagcgtaagctgagcgataagttcttttgtgtttatcttgatgcaacgtatataccgttgcgtcgagaaacttttgaacgagaagcagtatatattgccattggcatcaagcctaatggtcacaaggaagttatcgactactgcattgcgcctagtgagaatattgaagtctggacggagttgctccagaacatgaaatctcgtggtttaaagcaagtagagctttccctttcagatggcgttgtcggcatgaaagcagcactggcaaagacctatcctcaagctcatttccaacgctgcttggtccatgttatgcgcaacatctgcgctaaagtacgcgtggacgatcgcgaggcaatcatgaacgaattcaagcagattcaccagcaagccaataaagcggctgctgttgatgtattgcatgctttttatgccaaatggaacaagagctacaatcgtgtcattagaaacctgaaagacatcgagccagacctgcttgttttttataattatcctaagcagatcagggcttcaatttactctaccaacatgatcgaatcctttaataacgtcattaagcgcaaggctaagcctaaagcggagttcccgactgaacagtcgcttgatacttttattggcatccaagcaatgagctacaatgaccgctacttcaaccgaattcacaaaggctttggtcaagtccaggataccttagaatcctattttgaataaataaaacattaaaaaaacaatttacgagaaagatctatttacacaaaagatttgacagtttcggaaaatcaactactttaagaatgatcgcgggtttggaaaatattagtaaagggactttggaaattgaccatcaagttatgaatgacgtcgcacctaaagatagaaacattgctatggtttttcagaattatgctttgtatccacacatgaccatttatgacaacatggcatttagtttaaaacttcgtcattataaaaaagatgaaattgataaaagagttaaaagagctgcaaatattttgggattacaaggctatttaaagaaaaagcctagtgcactttctggtggtcaacgtcaacgtgtggctttaggtcgtgcaattgtacgtgatgcacctattttcttaatggatgaacctttatctaatcttgatgccaaacttcgtgtagttatgcgagctgagattgctaaattacatcaaaaattaggcacaacaaccatttatgtaactcacgatcaaactgaagctatgaccttagctgatagagtcgttgtaatgtcagttggcaaggtagagcagattggtacaccacttgaagtttataatcatccctcaaatcaatttgttgcaggttttattggttcgcctcagatgaatttctttaatgttcattataggaatggaagtattacagatggtaagggcttgaatattggaattccggaaggtaaagccaagctgcttgaagaaaagggctatgcagataaagacgtaatatttggaatccgtccagaagatattcattctgaacaagcctttctggaaacatggccaaatgcagttgtagaatcgcaagttgtcgtttctgagcttttgggttcaacgattcaactgtatcaaaaagttgatggtactgagtttgtagctattgtaaattcccgcgattatcacaaaccaggcgacaaggttaaaatggggtttgatgttaataaggcccacttttttgataaagacactacccaagccatcgttaattaaatattatttttctctccccctagataaataaaacaatgctttaagatagttcactattggaaattgacaataatgaactattttttgtactaaccatctatggaaaaatgagaaactgtcaaatcttttgtgtaaatagatctttctcgtaaattgattttttaattatttatttaatcaaagtaggattctaaggtgtcctgaacctgaccaaagcctttatgaattcgattgaaataacggtcattgtagctcattgcctgaatgccaataaaagcatcaagcgactgttcagttggaaactctgccttaggcttagctttgcgcttgatcacattgttaaatgattcaatcatgttagtcgaataaattgaagctctgatctgcttgggatagttataaaagaccagcagatctggttctatgtctttcaagcttctgataacatggctgtaaaccttgccccatttggtatagaagtcatgcaggacagctgtggcttcttctttgtttgtctgttgatgcacctgtttgaattcgttcatgatcttttcacgatcgtcgacgcgtactttagcgcagatattgcgcatgacatgaaccaaacagcgttgaaaatgagctttaggataagtcctggccaaggctgttttcatgccaacaacaccatcagaaagaaaaagctcaacttgctttaagcctcgggatttcatgttttgaagcatatctgtccagacttcaatgttctcgctaggcgcaatgcagtagtcaatgacctccttgtgcccattaggcttgatgccaatggcaatatagactgcttcacgctcaaatgtttctcggcgcaaaggaaggtatgtcgcatccaaatagacgcagaaaaacttgtcgcttagcttgcgtttgtggtaagcctcaacctttggaatcatctgcttggaaatatttgatacctgagctggactgtaatggctgccatacatcttttcaattagatcggctatttccctggtggtcacgcccttggagtaaagcttgataatcatgctttccaagatatccgagtgctgcttgtagccaggcagcgtgtgctgatgaaattgaccgttgcgatcccgaggcacttgcacttcaattgggccaaattgcgtatcaactttgcggaaataagcaccatttctagagttgccagtattccagccatttctggcatagggatcatagcccagaaaggcagtcaattcagcttctagcaagttattaacagcctgttgtagctctttgcgcaataaatcatttattttgtctggattgaatagagcttgagcaaaatctttggtaaaatcattcatgaaggagttcttctttctgtatgtgtttttttgttcaaaccaatcatacgagaaaggaacccctttttctaatgcttaaagaaataaatttaaggaatcattcatccttacacaaactattttacagtctccaaaaatgacaaagtaaatttgcaagaatagagttttattttaatattaatatttactagatatagattaagcaatgaaatgatgattttaaagtggtatgacacagattataaaacaggacatctgagaagcggtaatatggttaccatatttatgctgatagccactgttgccaagattgaagtaatcttaaatagtaatccacattggtgccttccaccatttaatgaatttttgtttagtagtgagataaagcgtagtgtgtttaagcctgatgatgagttgaaacaatttattagagattttaataagaaacaccaaaaacaaaattgataaatttccacttgtaactactattcttgtttaatatcttttgatatagttttaaacaagaggaaaaacaaatgttttgtcttaaatcattatttaactcatgagaatgtaaatacgataagcaatggtttaaaatcttcacgacgtccattttttatttaacttaagagaattacaattaaagctccaatcggggcttttttctttttcattaaacttcctattaaaagattacccttgaaactggtaaaatagataagtaagtatagagaacaatttttataaaaggggaataaaatggcagataaaaaattacttctaatcgatggtaactctgtagctttcagagccttttacgctctttatcgtcaactagaatctttcaaaagtccggacggcctgcacactaatgccatttatgcttttaaaaatatgcttgatgtccttttgaaggacgttgatccaactcacattttggtagcttttgatgcaggaaaagtaacttttagaacaaagatgtatggagaatataaaggtggacgtgccaaaactccagaagagcttctcgagcaaatgccttatattcaagaaatgcttcatgacttgggtattaaaacttatgaattgaagaattacgaagcagatgacattattggtacttttgtcgataagggtgagaagaacggctttactactactgttgtgactggtgaccgcgacttgactcaactcgcttctccaagcactactgttgaagtaaccaaatcaggggtttctcaacttgaagcctacacgcctgaacatatgaaggaagttaacggcgtcactccaactgaattcattgatatgaaggctttgatgggggataattccgataactatcctggtgttgaaggtatcggtcctaagacagcctctaatttgattcaagaatatggttcagtagaaaacttatacgatcatattgatgaaatgaagaaatctaagcgtaaagagcgtttaatccgtgaaaaggacaaagcatttttagctaaaaaacttgccacaattgaccgtgattcaccggtaactctagatatcgatgatataaaacgtcagccagttgattatgaaaagctgcgtcaattctatgaaaagatgaacttccgtaagttcttagctgatttaaatgcttcaggtgccggtcaagatagtactgaagttgaaaaagtggaatacatcgttttaaacgacgacaacgttaaggatgttaaggctactgaagatgacaccattgagttttatctagaaatgctcggtgctaactatcacttagctccttttgttggcttcagcttgaagatcactgacaagatctacgtttcaagagacgtggaattgcttgaagaagataatatcaagcacatcttagaagacgaaaagattaagaagaatgtctttgacctgaagagaacaatggttgctgcacatcgtttggacattcacactcacggccttgattacgacatgcttttggcatcctacttgatcaataatgaaaataactctaacgaccttggtgaaattgcccacctttatggtgattactccgttaagactgacctcgaagtttacggaaaaggtaagagcgagcacatccctgatgacgatgatgaattattcaaccacttagcttctaagatcaatgctatcgaatcacttaagaagccactgcttgaaaaactcaaggatcatgaacaagacgacctatttgaaacaatcgaaattccaaccgcgcgcgttttagccagaatggaaatgaacgggatgaaggttgaagcaagtactttaattcaactgcaaaatgaatttgccgttaaattgaaggaactcgaagacaagatttacagtcaagctggtgaaaagttcaatttgaattcacctaagcaattaggtcacattttgtttgaaaagcttggtttaccaccaatcaagaagaccaagactggttactcaacttcagttgaagtcttggatcaattaaagacgcaaagtccaatcgttagtgaaattttggattaccgtcaaattgccaagattcaatctacctatgtaaagggtctgcttgacgttatccaatcagatggccgtgttcacacgcgttacttgcaaaccttgactgcgactggtcgactttctagtgtggatcctaacttgcagaacatccctacccgcaccgaagaaggaaagcaaatcagaaaggccttcgtgccaagcgaaccagacggctacatcttctcttgcgactactcacaagttgaactccgtgttttagctcacgtttcgggcgatcaaaacatgcaagaagccttcaagaccggatacgatattcactcacacaccgcgatgaagattttccacttggattcaccagatgaagtaacgccattgatgaggcgtcatgctaaagccgttaactttggtattgtttatggtatttctgattatggtttatcaaagaatttaggtatttctagaaaacgtgctcaagagtttattgacaattactttgaacaatatccacaaattcgtgaatatatggataaggctgtgcaaacggctcgtgaaaagggctatgcagaaacaattatgcacagaagacgctacttgcctgatattcatgctaagaaatttacagttcgttcttttgctgaaagaactgcgattaactcgcctattcaaggatcagcggccgatattatcaagattgctatgatcaatatgcaaaagaagctagatgaactacatttgaagaccaagatagtcgttcaagtacatgacgaattgatttttgatgtgccaaaagatgaattagaaacgattaagaagatagttccagaagttatgcaatcggcagtgaagcttgatgtgccattgattgcagattctggttggggtcataattggtatgatgcaaagtaggtgatttaatgccagaaatgcctgaagtcgagacggtgcgacggactttaactccgctaatcgttggaaaaacgattaaaaaagtagtactttggtatcccaaaattgtggcaacagaccataagaaatttatcaaagaactaccaggtaaaagggtcttaaagattgatcgctatgctaaatatttactgatacgcctaagtgataatttaactattgtgtcacatttacgcatggagggaaaatatcatttaaccactcccgatgcgcctaaggataagcatgaccacgtagagtttatttttactgatcaaactgccttgcgttataatgacgtgcgtaagtttggccgcatgcagctgattttaacaggtactgagcgccaagtgacggggattggcaaactgggccctgagcctaatagcatagaattttcgtcagattattttatcaaggccttgagccgtaagaagaaaaatattaaaaatgtcttgcttgatcaaacaaccgttgcaggtttaggtaatatctatgttgatgagacactgtggcagagtggaattcatcctttgagtgccgcaaataaaattccgtcagaaaaagcaaaagagctgtggcagaatattaaccaaactattaaaattgcaacaaaaaagcgtgggacgactgttcatacttatttagatgccaacggaaatgttggtggctatcaagaaatgctcaaggtttatggtcatgcaggtgaaccttgtgcaaagtgtggcacggaactagaaaagattaaagtatcaggcagagggacaaccttctgtccacattgtcaggtggtttattaatgagctatgttttagccttaactggtggtattgcaactgggaaaagtacagcggaccagttttttaaagcaaataaaattcctgtgatcgatgatgatcagattgctcatgatttgatggagcctgggcaagcttcttggcaggcgattaaagattattttggctcagagtatttaaatgatgaccaaacgattaatcgaaagaaattagggcaattggtatttaaggattcgcgggctttaactaaattaaatgagttaacgcatccgttgatttttttgcaaacaaagaaattgctaaatcaatatcaagctcaaccaatagttattcttgatgtcccactttattttgagtcagggatggataagaaagatatagctgacggtgttttagtgattactttgcctgagaaaatgcaattacagcgtttgaaggagcggaatcatttaaccgatgaagaagcaagaattcggatgcaaagtcagttgcctatggtcaaaaaagagcaattggctgattttgtgattgaaaatactggtacaataaaagaactagagaataaactagcacaattattggtaaagattagagaagagggatagctatggaatgtccaaattgtcatcaaaatgcttctcgcgttattgattcgcggcctagtgatgaaaaccgggctattagacggcgcagagaatgtgaaaattgttgttttcgctttactacttttgaacgagtggaaactgctcctttgttggtagtaaaaaatgatggtactcgtgaaccattcagtcgaaagaaaattttgcacggagtaatggcagccggacaaaaacggccaatcagtagtgaacaatttgagcaattggttgatcgtgtcgaaaataagataagaaaacaaggcgttagtgaaatttcatctaagaagattggtcagtatgtcatggatgatttggctaatttggatgacgtagcttatattcgctttgcttcaatttaccgtgagttcaaggatatgtctagctttatgaagacaatggaagatatgatggccaaaaaaggaaagggtaattagtcatgtttgcaacgtctgatcctaagcatctttattatgtagccaacaagattaccctttttccagagaatgagaaaatcttgattaaactgtatcagcctttggttggcgcggtggcaattgccttgtatcagactttaatcaatgactatgatccatatggtattgtttctgatgcaaagggaatttattcactacaggagcaacttgattgtagtttaaaagatatgtttcattctttgcataaactggaagccgtaggtttagtgcaaacttttttagcggataatgtcttcaataatatcattgtttttaagttattacaggttcctagtgcagacaaattttttgcaacaccactgctagcaagtttgttgaaagaaaaagttggcagcccaacctttcatgacttgagtcatgcttttgctaaggaagcaaaactgcgtgaaaagccaatcaagaatgcgcgcgatgtctcagccaacttttttgatgtttttcgcttgccaggggatgaagcaattaatccatctaatgaggtagtagaagctgcgcaggaaaataaagcgcctgaggtagaaactgctgaaattaatgcccaggatccaattgattgggatctgattaaagatcaatataatgtctatcaaattccagctcaagaagtagaaattaaaaagaaccaaattcggggcttaatacagacatataatttatcggaacaggaatttgtggatgagactgttccctgtttgcatggtacacataaattaaacatgcatgaaattagtaataccatagcagaaaattataaacgattgcatactagggaaaacattcaaaaacaaattgaagaaggcaaaaagcgcgctattgcgactatcaaaggtttggacgctaatgatagaaaactgttactcgaagctaatgaaaattccccatctgaatttttatacaaattaaaaactgaaaagggtggaattttagctccaggcgaaaactatattattaatcagctgcacacgcagtatggcttgccggaagatttgattaatattttgattcatacctgtttgacctacgatactgttgtaacttctaatcgtgcttatcgaatagctaatgattggctgcaaggtggtattagtactggggtacaagctcttgaatatgtgaagaagcgtaaagccgatattcttaaaaagaaaaatcgacagtcatatcgacaaaataagcgagtcgaaaaaggtaccgattggagcaagaaaaaggctaaaaatgaaggtatgtcaatagaacagctgaaggatatctttaaggatctgaaaaataagtaaatagagggtaggtgaaataatggaagcaattggtgatttgcttaaaaaaatagttaaagagcgtaatttaggtaatgagaaagaactgttgaaaactgctttacacgatccagatgtgcaagcgtttttgcaggcaaatagggaaaaaatagataaggcgatgattcgaaatagtatggccaatatctatgaatattatgcgcaaaaacatagtcagaatcaggtgctggccggttatgctccgcaattatttttgaacggcaaagtaattgatgtacgttacaaacctaccgaggctaagattgtagcagatcagcaacgagcagccaagcggcgtcttcatttaattgatctgcctgctaaattgcatgatgttaatttaagtgatattgaggttacaaatgatcgccagcaagctttaaccctgatttatgattttttgaaaaagtacaaagctgatcctcaccaacaaggcctttatttgtcgggcgactttgggatcgggaagacctatatgctagcgggacttgcaaactatgtagcaactaattttgatcggaatgttgtatttttacatgttccaacttttattgcaggtttatcaagtcattttggtgataacagcttgcaagatgagatcaggaatttagctgaatgcgatgtcttaattttggatgacattggggcagaaacattaagtcagtggtcacgtgatgacgttttaggagtaattttacaggcaagaatggataatgttttgccaacctttttctcttctaatttagatatggaagcattagagtcacactttgaggaaacccgtaatgcaactgatccagttaaagctaaaagattaatgcaacgagtacgttttttagctaaagaagtagtagtttccggtcccgatcgacgaaatttttcgcattaatttcaaaaagttcttgcatcgttcactttgatgcgtataattgaagttaattaaacgagacatgatgatgttcggctcagagagaaggacctagtgctggaagttcttcattagaaaatcaccccaatcgtttattcccaaaattgaattttaagaggctggatacctttatcaatctatacgagaggttagacgtacgctaacctgaattttgggtggaaccacgcaattaacacgtcccagtgcttttattagcactgggatttttttattggaggtaaaaatatgagtttttcaattactttgccagacggttcaaagaaagattttgataaggctgtttcagttaaggaagtagcttcatcaatcgctacatctcttggaaaagctgccgttggtgctaaagtaaatggcgttgttaagccacttgattatgaaattgacaatgatgttgaagttgctattcttactgacaaggatgaagaaggcttagacattttaagagctactgctgcttttgcacttgaagcagttgctaagaacaagtacccagaacttcgtttgggtcaacatgttgctgatgaaggcggcttttacgtagatactgacaaagatgaccaaattaaggttactgaattgccagaacttgaaaaggctatggaaaaattagttaagagtggtcaagcaattgaacatgttgtaatggacaagtcagaacttgaagatattttcaaggatgacccttacaagactgatcttttgaagaaaattgatgctgacaaggttgatgcttacaagttaggtgatttcgttgactttggctttgatgctttattgccaaacactggtaagattaagcacttcaagcttttgtcagttgctggtgcttactggcttggtaaatcatccaacccaatgcttcaaagaatcttcggtactgctttcttcaaggaagctgctttaaaggaagatttgaagcgtcgtgcagaaattaaggaacgcgaccacagaactatcggtcgtgaccttgacctcttcttcgttgatcctaaggttggtgctggtcttccttactggatgccaaagggtgctactattcgtcgtgttgttgaacgctatatcatcgaccgtgaagttgctgacggttatcaacatgtttatactccagtattaatgaaccttgatgcttacaagacttcaggtcactgggcacactaccgtgatgacatgttcccaccaatggacatgggtgatggcgaaatgcttgaacttcgtccaatgaactgtccttcacatattcaaatttataagcaccacattcgttcataccgtgacttgccacttcgtgttgctgaacttggtatgatgcacagatatgaaaagtcaggcgctttgtcaggccttcaccgtgtacgtgaaatgactttgaatgatggccacacttttgttgccttggatcaagttcaaactgaattcgctaagattttgaagttaatcatggacgtatacaaggacttcgatattactgattactacttcagactttcataccgtgatccaaagaatactgacaagtactttgcaaatgacgaaatgtgggaaagaagtcaaaagatgcttaagggtgctatggatgaccttggccttgactatgttgaagctgaaggtgaagcagcattctacggtcctaagcttgatattcaaactaagactgctttgggtaatgacgaaactatgtcaactatccaacttgacttcatgcttccagaaagatttggcttaacttacgttggtcaagatggtgaagaacaccgtccagttatgattcaccgtggtattgttggtactatggaaagattcattgcttaccttactgaaatttacaagggtgcattcccaacttggcttgctccagttcaagttgaaattatcccagttaaccttgatgctcatggtgaatatgcagaaaaggttcgtcaagaacttgctaagcgtggcttcagagcagaagttgatactcgtaacgaaaagatgggttacaagattcgtgaatcacaaacccaaaaggtaccttacactttggtgttaggtgacgaagaaatgaagaacggtagcgtaaacgtacgtcgttacggtactgacgaagaaatttctaagagccttactgattttattaatgaaattgatgcagatgttaagtcatactcaagagaaaattaattaatataattaaaaaataaaataaaaaaacgtatgctatgccaggtctaattaagatggctttattgcatacgtttttttggtaaagctaatgtaattgatttttacgtttgtaagtaagaagtaaaagaattgtcatcccctttaacttttatgaaatattttaatgaaataatgaaaataggagttatataaggaaaggtgataaacttgaaaaataagctcattatatttatgacaactgcgctattcatgttagctattattgtaatgggtcaaaatagagtagatgctgcatcctggggagctaagaatttatttactacaccaaaggaaactcgcggaacatggtactataagcaagaaggcaaaataaagaagcttaaaattacaacgcatacatttaataaaatcaaattatataaaatgttgagcagtaatcaagcgattaagtggactaaaaaattagctaaaactgataaaaagtcggggtataaattagctcaaaaagttggtacctctcaatacgaagctactgattttaaattttataaaacagcaggttttgctgccaatggttggctttctagtgatagagctgattcaggacacacttatgttgctataaagaaaaaagataaaagtaataatgataaagtagatacactgcggagactgtaaaatagtttgtgtaaggatgaataattccttaaatttatttctttaaacattagaaaaaggggttcctttctcgtatgattggtttgaacaaaaaaacacatacagaaagaagaactccttcatgaatgattttaccaaaaatatagcacaagctctattcaatccagacaaaataaacgatttattgcgcaaagagctacaacaggctgttaataacttgctagaagctgaattgactgcctttctgggctatgatccctatgccagaaatggctggaatactggcaattctagaaatggtgcttatttccgcaaggttgatacccagtttggaccaattgaagtgcaagtgcctcgagatcgcaacagccagtttcatcagcacacgctgcctgactacaagcagcactctgatgttttggaaagcacgattatcaagctctactccaaaggcgtaactaccagagaaatcgctgacttgattgagaaaatgtatggcagtcattatagtccagcccaagtatcaaatatttccaagcagatgctccccaaggttgaggcttatcacaagcgcaagctaagcgacaagtttttctgtgtctatttggatgcgacataccttcctttgcgccgagaaacgtttgagcgtgaagcagtctatattgccattggcattaaacctaatggacataaagaagtcattgactactgcattgcgcctagtgagaacattgaagtctggacagagatgcttcaaaacatgaagtccagaggcttgaagcaagttgagctctttctttctgatggtgttgttggcatgaaagcggccttgaccaggacttatcctaaagctcattttcaacgctgcctggttcatgtcatgcgcaatatctgtgctaaagtctgggtggatgaccgcgaaaagatcatgaacgaattcaagcagatacatcaacagacaagccaaaaagaagctgcagctgtcttgcatgaattttatgcaaaatggaataaagcttatagccatgttatcaaaggtttgagggaaattgagcccgatctgctggtcttctacaattatcccaaacaaatcagagcttcaatttattcaaccaacatgattgaatcctttaacaacgtcatcaagcgtaaagctaagcctaaggcagaatttccaactgaacagtcgcttgatgtatttattggcatccaggcaatgagctacaatgaccgctatttcaaccgaattcataaaggctttggtcaggttcaggacaccttagaatcctactttgattaaataaataattaaaaaatcaatttacgagaaagatctatttacacaaaagatttgacagtttcgcactgcgagtaggaaatggagcagataattcatttttatattattgttataagagcaaaaaattaatcaaataagttacccggatttaaaattgaagtgcaacactaattgttaaacaaaaaggccatgaagacctaaacttgaagtgaccaaaaatcaagaaaggaagatcttcatgaccaactcaaattctagcatttccaagcattatcatcaattgaacagcgaacaacgtggacaaattcaagctctgcttgattctggcataacctcctgcactgctatcgctcaagaagtaggctgtcataaatcaactatcagccgtgaaattagacgaggcagtgtcctgcaaagagacagcagctatgtcttgtatgagcactattacgctgatactgcacaaatttatcatgaaaagcgccgcagaaactgctataagtgtaatccactgcaacactatgccgtctttttcagaatgctaagcagacgctttaaagccaaatttgatgccactagcattgatgaattcgttggtgaatttcacaggattatgccaaattatccatgtcctagcacgcccactgtctatcgttatattgatcaaggattgctggatataagcaatatcgacctgccaatgaagcttaaaagacgcagaaacaaacgccatcatagtcatggtggccatgctccgcataaaaagaatcttggcaattcgattgaacagcggcctaaagaagttgaaaacagaaaagttcccctgcactgggaaggcgatttggttaaaggcgtcagacgtaaaaatcaacctgccttaatgacactgactgaaagaaccactcgttttgaggttgttatcaaaattcctgactatcgggccagtacttgtcaaagactgcttcaaaaggagattgacagacatcctaattggtttaaatcaattacgtttgacaatggttctgagtttgcggatatgaccaaaatcaaaggatgtcagatctactttgctcatccatattctccttgggaaagaggcacaaatgagaactgcaatggacttctgcgtcaattcttccctaagggcaaaagcatgaaagataagtcagctgcttatgttcaacaggcaactgatgccattaaccgcaaacatcgtcgaatcctccaatatcacacagcagaagaactcttcaagcaatacgttccttcatagcctaactgttgcacttaatttgacaattcaggatcaaataagttataataattttattgatgtgttcaactacatttttatatttttgcactgaaatcttaattcagtgcttttttcataaggattagactaaataagatgataatacgccagcgaaaaaattatttaacttctcaatttttatctaagattagtgccgatgggactttaaatattgaaaatttaattgtcctgacttgtgcaatttttattgcaagtattggactaaatgttaattcaacagctactattattggcgcaatgttgatttctcctctgatgggaccactactagcaattggcacaggtcttgctttatatgatgttcacttactgcgtaaaggaacaatttcattattagcagaaattattatcagtttagctgcatctacaatttattttcatttttctcctttgacttatgctagtcaagagattattgcacgaacttcaccaacaatctgggatgcgatgattgcgttttttggaggggtcgctggaataatcggagctcgcaaaaaagaagcaaataatattgtacctggtgtagcgattgcaacagccttaatgccaccggcttgtacgatagggtattcaattgcggcaggtaatcttaaatattttttaggatcaagctatttatttttgattaactgtgttttcataattttgactgcattcatgggtgtaaaaattatgaagtggttaagttattctactaagcaatctaagttgtttttcttgcacaagccgacctttaaagagtttgtgataattttagtagtaattattttaattattcctagtatcttgtcagctaatcagatggtgaataaaactctagtagatcaaaatgttcaaaatcttgttgttaatgaattaggcaatgttaatttaattaaggaaaatgttgatacgcaaggaaaaataattaatcttacagtttcaggcgataaaattaacgctaagaaaattcaagcggctaaagcaaacttaacaaaatatgacctgaaaggctattcactgaatattgtacaagtagctcaggttaatcccaatgcagaaaatcaattagatcgacaagtaaataatattattaatcagcgtcagcatgaacaagaacaagctgatgaaaaacgtcaacaagaacaagaaaaacgtaatcaaaaaattcgcaaactgtcatctgcaatatcttctgttactgcagttagtgataataaaaataagcaaattactttgatagagttaaaaaagccgctatctaagaagagaaaaaacgccttagtaagacaaataaaagataaatatccaaatattaatttagtggaatttgttcaagaaaatattaaaaattagaagaaactgtcaaattttttgtgtaaatagatttttctcgtagattgattttttaatcttttatttaatcaaagtagaattctaaggtatcctgaacctgaccaaagcctttgtggattcgattgaaatagcgttcgttgtagctcattgcttgaatgccaataaaagtatcaagcgactgttcatttgaaaactctgctttaggtttagctttacgcttgataacgttgttaaaggattcgatcatattggtggagtaaattgaaaccctgatctgcttaggatagctgtaaaagaccagcagatcaggttcaatctctttgagatttctgatgacatggttgtacgctctgttccacttgtcatagaaggcgtgcaagactttgatcgcagcttctttatttggctgttgatggatttgcttgaattcattcatgatattttcgcgatcatctacgcgtactttagcgcagatattgcgcatgacatgtaccagacagcgttgaaaatgagctttgggatatgtcttttccagtaccgtcttcatgcccacaacgccatctgaaagaaagagctcaacctgttctagaccgcgagacttcatgtcttgaagcatttccgtccaattctcgacgttttcgctgggagcaatgcggttaatcgatgacttccttgtggccattaggcttgatgccaatggcaatataaactgcttcacgatcaaaggttatgcgacgcaaagtaatgtaagttgcgtccaaataaatacagaagaacttatcgctaagcttgcgttgatgataggcttcaacttttggaatcatctgcttggagatgttagatacctgagctgggctgtagtgactgccgtacatcttttcaattaaatcggctatttctctggtggttacgcctttggaatatagcttgataatcatgctttccaagacatcggagtgctgcctgtagtcaggcagcgtgtgctgatgaaacatgccgttgcggtccctaggcacctgaatttcaatctcgccaaattgcgtatcaactttacggaaataagcaccattgcgtgaattgcctgtattccagccagctctggcataaggatcatagcctaaaaacgcagtcagttcagcttccaataagtcattaactgcttgctggagttctttgcgcaataaatcgtttattttgtcttgattgaatagagcttgtgccatatttttggtaaaatcattcatgaaggagttcttctttccgtatgtgttttttgttcaaaccaatcatacgagaaaggaactcctttttctaatgtttaaagaaataaatttaaggaatcattcatccttacacaaactattttacggtctcattatatctgtatattaatgcacaaatgctgttatatcaacgattagatacttcgctttataataaacagtgttattataaagatgccgagagggatagaggcaataaagaattagaatcgaaaggtgatatatatgttagatgttttaaataacaaagtagaattaagcaacgtacattttgcagaacacaaattagcaattgaagatgctaaaacaatgttagaaaacgaaggttggattgctactaagtaaaaagtgttgataattatgaaattaaaaacagaaaatgagacgcacgataaagtacctcataactgctataaattagctagtagttatgagtcgttttttattttttgcttgttatctattgatttgtagctaattctatatgacaatgatatctaaattattgaactataataaaaatccgttattttaatttggtctaagttgctatatattcaaaaaaatcgttaaatttttattatttatttggcggaatatgatatgaagaaacgtttcaaattagctgctatttttgtggctgcaatgttcgcagccgcacccgttgttggtatggcagaaacatcaactactgtttcagctgatgctgacatcatgcaacaatacacttttaatgactcagttttggactttactcctactttaaaggtttatattgctaagggtcacaaatttaccaccagtaaagaaactgcttacaaggcaaaataattaggattgattccgaaaatatagagctgttagatttaccgtggtctagcagcttttttgatgcaaaaaaataccactcaccgttaaatttagaccattcacctgaatttaataatttaacgaaaataagcaggtatactaataatcaatcaaggagggatgcaattgaaagttaaattgaatatcgatccaagtttaccagaagaaaaagctgaattttggttaaagaaaatgactgctagatttgaacggattactaaagagttgaattcggagcaggattttctttggtgctatctagatggggatgcctatgaaattaatttttctcaaatctatgcaattcaaatagaaaatgaaaaaacaatgatttgtactcaaaatcaaaaatatgtttataggggcagattgtatcaagtacaaagtgttctacctaacgattttataatgatttctagaggtgctattgttaattatcattttattgatcatctagaaattataaatacaggcaatattgatgcgcttttggagaatggactaagagtacaagtttctcgtagaagaataaaggatttaaaagagaggctaggattatgaaaaatattaaagatcttttatataacggtctgattagtggactgattggtattggtatcggtacgatctggatggctatggacttcttgttttcactaaatggtcaaaatcctgcaacagcgaagatatatttgaaaacctttcttttttggacgattatttcttttctcattggtattttcttttatctagctagctggatttttaatagtgaaaaatggtcattgaaaaaacaaatttttattaatttcttcgtctgttttgttgcctggttcttgttaaacctcctaattgataattttagtatttcactaaagatggttattagagtaacagttgattttattattatgtacgctattgcatacggtggatattttttacatttatggaacactgttagacgaataaatgcaaagttaaaggaaaaatagaataccataattaaaaaatgaaagaggtacccttgcatgactttattatctgtaaataatatttcaaaaacatatcaaaaagcacataaaaaggcggtatctgatgtttcatttaatgttgatagtggtgatattgttgccttcttaggtcctaatggtgcaggaaaaactacaacattaaaaatgattcttaatttagttagtcctgataaaggaacggttgtattcgacggaaaagatgtaactcacaacaatctctttttattgaaaaacactggcgttttattagaaggatctagaaatatgtattgggccttatcaccaatggaaaattttgtttattggggtggccaacgtggtttaagcaagaaagaggcagaaaaaagaggagaaactttcctcaaacagtttggtctgttggataagaaatacacctctattaccagattgagtagaggtatgcagcaagttgtgggaatttgctgtgctatgattgccgaaccaaagcttttaattttagatgagccaactttaggtttggatcttaatgctactcaaataatgattaagagtctgaatatgttatccgccaatggagtagggattctagttactacacatcaaatggaatttgctcaagagatagctaataaaattttattaatcaatcatggtaaacttgtcttttctaatagtataaaagatagtttgaagaagctgaataaacaagaaatttttgaagtgcatttcacccaagaacttaccgcctcagaaaaagaggatatacttgcaagctgtgaacttacaaagaagactgacggagtttatcgtttgggtgttaaaccgcaagcatctctttcacaagtacttaaattattgagtgaattaccaataagtagtatacaaactgtgactagaggattagatgaaatttttaagtactacacggagaaggaaaaatgataagttttaaagctgaattttggcgtcaattctatttatataagagatacctcttcaattatatttcagaatttttcttattaattttaatgtttatggctattttttggggcggtagccttgtaggaggtggcgttttaggaaaatcattgaatgccctagtagttggctatgttttgtggagtttaattgaaaacactattagccaaatgggctaagtgtataattttttacggtaagttgaataaataattaaaaaagcccaagtcctttgaatttggacttgagctcaaacaaaaagaccagtagtctgatgttaagaacaaaaaacacattagaagctggtcttttatgaattcaattgtaactgaaatcgcaaatattataaagtctgaagataattatattaagcgtgaaagaaaaataatctgtttcttcttaaacctgattaaggaaatcatggccttggctttagctaaagttgatgatgaaatgattaccaaggttaaagcacagggctatcagattgataagaagaatgagcgctcaatcaatatggcttttggcgaagttaggtatgtcagaagaagatatgtctgcccaggcaaacaagcaaggtatcccttggatgaattaatgggctttgacaaatacaagcgctacagtattttagcagtcaaaaacatcttagaagtaagcagcgttgccacttatcgcaatactgctctagcattcaattgcctgtctggctttaatattagccatatgcaggtgggcaatttggtaaaaatggccgggaaaaatattaaagctggccaagaagcagattcaagatatgatgccgcaggcactaagaaaaaggtcccagttttgtatcttgaaggcgatggcgtggtgatcaaaggcactaaaagccggttggaatttcatcgctatcaggtctgtgaaggcattgtcaatataagcaagaaacgcagaaagcgaatcaatgccaaggaatttgtttctttaagccgacttgatgcgctgaacgaagccaaggagtacctggccaatacttatgatctttctgatactgtaattcttagcaacgccgatggcggtgctggatatgccaaaacagacttcgatgacattgtagggctatgcaagcgtcatgagcatttcttggatgtctttcacctaaataagaaaatcaaagaaaggctatattttgcgcctgacctgcaaggcaagctgatttctgctttggaatacaaatacagctatgacaaagttaaaactatcctaaccactgcagaaagccgactaattgatgaattgaataccgagctcaatcatgattatctggggcgcctaaggaattatattgatcgtcattgggacgatattaagccgtttaagaaatgaaaactgactgtgactaaagccattggctgctgcgagagcaaccaccgcaagtatacctaccgtgttaaggggcaaggcaagaaatggtcaaaatctggagcagaaggcatgcttaggatcttaagctgcatcaagaatcgagagctggaattttggcttagcagcgagtttgaagattcagaaataactgtattgactgaacaggaattaaaagcagcggcccgtgacagcttaaagaagcgtcatgaagttcatttaggcatccagcatggcgcattaaccgcacaggtagctggcaatagttatttaagcaagctaagcagaaatttaagtcatataaatatttaagaaattaaggttagactaatggtttaaaggctaccgcaaaaacattgacacttacccaaatgggatcaacagtgatgaataatgccaaaagtggtattttagaacaacaatatcttatgccaatttcttctagaagattatttttaaataaaagtattgcaaatattgttgtggcattcgtccaagcaattttaattctgatagcagtaatggcaatttctgatcactggattagttttccagtaataatgattgttccatttatattagctttactaactacagtgggattaggctatttaattgttagcttagttttacgttttaaaagaattggcagtaccttagtgatttttcaatatatttacttaggtatactactagttaattttgaaaactactccaatcttacaaaatgcttatcttgtttattgccaatttgtccaatggttagttggatgagattagcagttaacaatcgaccatacaatttagcgttttatttaagcgaatctatctttaataccgtattatggttgattattggattgctagtatttaatttagctgataaatatgtaaagaaaaatgggactttatctttttcccggatttaaaattgaagtgcaacactaagtgttaaacaaaaaggccatgaagacctaaacttgaagtgacgaaaaatcaagaaaggaagatctttatgaccaattcaaattctagcatttctaagcactatcatcaattaaccagcgtacaacgtggacaaattcaagcaatgctggattccggcataacttcccgtactgttatcgctcaagaagttggctgccataagtcgacaatcagtcgcgaaatcaaacgcggaagcgtcctgcaaagagacagcagctatttattgtatgagcactattacgctgatactgcacagatttattatgagaagcgtcgcaaaaactgctatcagcgcaatccattgaagcattatgctgtctttttgagaatgctctccagacgctttaaagctaaatttgatgccaccagcatcgatgagttcgttggtgaattcaaaaggactatgccaggctacccttgtcccagcacaccaactgtctatcgctatattgatcagggcttgctggacataagcaatattgatctgcctatgaagctcaaaagacgcaggaacaagcgtcatcacagccatggcggtcacgctttgcacaagaagcatcttggcaattccattgaacagcgtcctaaagagattgaagacagaaaagctccgctgcactgggaaggagatctggttaaaggcgtcagacgcaagaatcagcctgctttaatgactttgactgaaagaaccacacgctttgaagtagttatcaagattcctgactatcgggcaagcacatgccaaaggctgcttcaaaaggagattgacagacatcctgcctggtttaaatcaatcacgtttgacaatggctctgagtttgcggatatgaccaagatcaagggctgccagatttactttgctcacccatattctccatgggaaaggggcaccaatgaaaactgcaatggtcttttgcgtcaattcttccctaagggcaagagcatgaaagacaagtcaaaagcttatgttcaacaggcaactgatgccattaaccacaaatatcgccgaatcctccaatatcacacagcagaagaactcttcaagcaatatatttcctcatagcctaactgttgcacttaatttgacaattcagggactttatctttttattgattttagttgctaataaattcattcatccctgaaaagtgattcttgcccacaaaaatttcaaggaataacttctacttatgcattgttctgtggtaggaacgctgtaaagtttgtgtctgcagcttgggtaaataataacgatcttcatgtttaaaaatagggcaaaaattgctctatttttagctcccattagaattttccgtggcataattgacgtataaatttgaaagggagatataaaaaatgaagaaaaaagttttatcatttattgccgcttttttagttgttttaggtttggctagcgttcatgcaaacacagcaaatgctgctagttagggtgctaccaaacttttcaccacacctaagaatacgcgtggtgtttggtaacacaaagaagctggtaaagttattagaactaaaattactgcacatactattaacggcctcaaggtttataaggtattaaagggtaaagaagcagataagtgggataaaaagttaactgctgccgatgaaaaggctaactacaaattagctgacaaagtttctagctcacaatttgaagcttatacctttaaattccacggtattacggatttcaacgcaaacggctggcttgctggtagcggcgacggctactactatgctcctatgaagaagaccgttaagggtaagaaagttaatgctttgcgtgtcggcggcggtgctggcaactactttatcagctacgcttacaaggataagaaattagcgtaaattgcaataataaattgaacacttaagctgcttgatagattttgtctaattctctttcaaagatttcatctggtgtgtgatatgccaatagttttcttggcaatgaattacaccaggtttcaatatcaatgatttcttgaagagaatagttattgatgtagtcacctttaggaatgaatctgcgaataaggccattgtgtctttcaacagtgcctttatcacaagaagtatacggatgagcgtaatagactaaagtgttagatactttctctaagttggatagatccgcaaactctgagccattgtcagttgtaatcgttttaaaaatttcattccagtgtttctatattgactgtgcaaggattgaaaagctgacattacactgttagccgttttatccggaatacgtatgatcaagaactctcgactcattcgttcagacaaagttagcagcacttgatcgtctctagtcttatgtcctaagactaggtcacattcccagtggccaaactcttttcggtcttaaatcactttagggcgctcttcaatgcttcgacctagtttctttttgtttttacggacacgatgaattttaatgttacgctttaatttttcgggtaaatcagagtttctgatagccaacaagccttggtctacatagttatacaacgttctagtacagactgtttattcgctgctaaattttcctatagccagacagcgattggcgcatacatcaagcgaccaattattttcaaagaagtgcttaatgacatacttaataaagtcattcttctttaagaaatctgacttgcgaccgcagcggtgacgatccaagtggtaaacttcattaccatgttttgctttatatcgcttttgcttgccattataaagcaaaactgtgccacgcttaacttcataactgatcgtagaaggagaacagccaatttcacgggcaatagctctaagagagaagccatccttgatacgagtttaaataataactcgctcttctagtgataaatactttcccttttcgtgcttaggcatgatagaatgtaaagagtccatttgtgacctcgtttctgaatgttttgtggtaattacattttatcaaacaggtccaaatggactttttatttttctaaagtgttcaatttgattttacaatcggcgaaatagaaaatatgttaattcataagaaaattatttttcaaataaaggcactttcttttgtgatttaacttcaaaaagacctttatcagagatttttagactaggagaaacaagtaaagacaaagtagagaaagacataatttcgtttgtatttttatagcccaattctacgagatttttacgtatattaccaatttgttctcctaaaatcttcattggttgattgcttacaactccaccaattggaagaggagcattggctgcaatcttttcacctctggcgactatataaccaccttgctgattaattaattgatgttgaatgtcaatcatgccatctatatttgttcccattaccatcaaattatggtgatcgtgagcccaggttgcccctacagcaccatcaccaataatgccacgatcaactaggcctaagctaaatttaccatcatttaaaccatatctttcttggacaataattaaagctaaatttgcactttgccaatcaacgatatgattatgtacagctagccttttttgaatatgatttgtaaaagtaccgacaggatttatttgaatgacatttgctgtaactgagccattatcaacaagatttgttttaagtaataggtcttgtttagttaatttaggagctttcacactagtagttagactattaggtgaaaaatcatcttgagaagtatttttgatagtctcttttgcggatattccatttttatagacatcagctattgagagttcttctaaattatccagaatggagaaatcagcaactcttcctggtgcaattgcaccacgatcccataatcccatatgtcttgcaggaatataggtagaaatataaatggcgtcttctggcttcatccccatattgattgcttttttaactaataaatttaagtgaccttttaacaaagtatcaggcattgaatcatcagtaactaaggctacatgttcaaaatatttattatcaataatagtattgatgacatctggatgcatggattttaattgaacttcaacaaacatcccgtttcttatcttttcattgactaaatctctagtttgttgagtatgatcagtagtaacaccggcatataaaattttagctaaatcttcaccatgataagcaggggtatggccttcaattggcatagtaggtttagttttatgacaagtattaattatgtccttaattagagtgtccttgtcagaagtcatatctttaaagttcatgacttcacctaagcaaataaagcgtggatctttaagtaattcttttacttcaggcacaccaattttaccgccagttgtttccatttgaggattggttgaaggaacagaagaagggatgccgaagaaaatatcaattggcgaatcttcattaatgaaatcttttaatccattaataccggcgacattagtaacctcatgatcatcagcaataatagtagtcgtgccatattttagaattgtttcacccattattttaggtgtagtcattgagctatcaatatgcatatgggcatctacaaaaccagggattaaatatttaccttgtagatcgatgactttttttgcttttaaattaggtaattctttattaatccaatagaatttgccatttttaatacttacttgaacatcttgaaattttcgtaaatatacattaaaaacatgagcatttttgataattaagtctacctcagtcatttaaaatcctccataaaagataaggagctgaatctacaattcagctccttatagggaataaacatcaattatttattcataatcttattccatcttgaaatccagttagacatatgtgaatttacaaagaagaaattaatagtttttgctcttttagcaactgagccataagttttgtttgctgcttctgcaggtgttaatttaacttgagtgtttacaggagcgttgttcaaagatttaagacctgctactttcttttgaattttttcgcttaatctaaagttgatgtatttgtatgcagctgctgaatttttactattctttaaaatagagacattatcgtagttagcatatgtaccagacttaggaacgatgtattttaagtttggattagttgcttgaagcataccaacagcataatcaccaactacagcagcttcaatttcaccagatttaaacatgttacttaaatctgaactttgggtgtaagttttgacaacattaggttttaattctttcattgccttaaatgctgcatttccgttgtctttagttacactagtaccagcatagtcaccagcaatatataacattgcggggccaaaagtagttgtcatatcaggtacagcaatcttatttttaagtttagatgaccataagtccttccaagaattaatattaactttctttggattatagataatacccaaactgtttacggtataaggaactgtattagtttctttagctagtttttgttctgattttgataaatatttgaaattggaaatcttagagaagtctaacttcttaaataacttctttttatcgccagtaacagcattgttttgagcaagttcaattacatcaacacctgtattagggttatgttcaatttgagtaagtcttgttgcactatcaccaaattgagtttttactttaactgatgattgtttagcaaaaggatttaaaacatcgttccgcatttgtttggtagataaaccaaaggttgaaacagttaaatttcctccgttagaagatgattgtgatgaacatgcagttgtaccaaatgcaactgaaccaactaataaaaaacttgcagctaataaaccaacttttttaaaattcatttttattcctttctttacaattggttatctagacaacggatgaagatgcttggagggcaaataaagctgaactttatctcctgagctacgcatcgatttcctagactcttcaacagtgaagtctccgagactagtacttaccttatatttaaagctctgacctaaatactcaagactagtgattgttccatcaatcaaattattagacggattttcttctgaattaatcaaaatattttcgggtctaatagttaataccttagcttgaatattattttcatcagttaagaaaacaagatctttacttttaatttggcgatcattaataatttcatcaacattgatgaaattatcataaccgatgaatctagcaacatattctgaactagggtggtgaaagatgttttcaggagtatcatattgatcaattttgccatctttcatgattaatactttatcggaaatagcgaagcattctctttgatcatgagtaacaaaaagaactgtcatttttagcttttgctgcaattctctaatttcgctacgcattttaattcttaattttgcgtctaaattactcaagggttcatccattagtaataattgtggattgactaccaatgcacgtgctaaagaaactctttgttgttgaccaccagataattctttaggatagcgagaagctaatttagacaagccggttatttttaaaatttgatcgactcttttttgaatgtcacttttagacatctttttcatttttaatccgaaagctacattattaaagacggtcatatgtgggaataaagcgtaactttggaaaaccattccaaagtttcttttgtaaactggtacttttccaacatcttcaccatcaactaaaacttgtccgtctgttgctggaattaaacctgctatgattcttaaagtggttgttttaccgcaacctgagggtcctagaatagatactaaatcaccgttttttacggaaaacgaaatatcttttaatactttggttttaccgttatatgattttgctaaatcttttacttctaaaattgccaatttaattgttcctatcagtaagtttatttagaccaactagtttttcagttaaaagcataattaatgctgtaaaaatcattagaactacagaaatagcagaaacagttggatcatagttgttttgtaaatagttcaaaattgctggtggcagcattgtaattgatggtccattcatgaacaatgaaattggaatattattaaatgaattaataaaacacatcataaaggctgctacaatacttgctttaatgttaggtaaaacgattaagaagaatcctttctgaggtgaacatccacaaacccaagctgcttcttcaatatttttatccattagtaacatacttgctgtaactagtcttattacataaggtaggcataataaaaagtgaccaataattagactaggcataacaggtagtctaagagtaacgacagcagcttgatataaggcaaagccaattacaatttctggaattagagtagggcttaagaagaaagagtgaaaccaagacttatgaacgaatgaacgatgttgaatcttgttaaagcataaactgcagggataccaattattaatgccgaaagactagcaataatggcaacgaacaaacttgattcaaatccactgataaaatctggttgctgaaaaatattggcataccaggataaagtaaaacctttaattggtagagaaattgaatcctgattattaaatgaagtaataattactaacttaaacttcccacatcaaataagctggcaattctttgatattgcttagctttgggcttctatactatttttgctagttttctttaacaatttttgcatgtatttgggtaaacgattgataaagtcagccgtgaattctgctatttgtgcttcactggcatgaaagactttttcaacgctagccaccattgcttttgtgattagctgaagtgaatgactgaatgtaatatccgccagctcatcaatcatgcaatagaaaagctcacctaaggttcgctcatcttcgtcgtcccgcttggctactgacatgagcatatagcgggtaaagactatagccacatgagcagtcaaggcatcgtaggacagaccatgatattccgtgcttagttttaggtagcttttgcaggttttgaaaaaaacttcaatatcccagcgtttgccataattgcgaatgacttcatcttcgctaagcgacatgtcggtacaaataatagccagccactctttacgattggcacggtttctaacgcaaattatccgagcgtcaattttagcaccgtctttgtcttggcggccaaccttgactggaattgacaacagatagcgcgaacgcccgcgtcgctttttacagctacgataaatctgtttgatgtttttgcgttctccttcaaattcatatttgattttggagctaactttaaccatggcaattacatccagcttcctttgcttgagctggacgatttgatgtggatttgagaaccagctgtcaaacagcacgtacttggcttgatgacctgctttcatagcttggtcgattaaattaaccatcacgtctgtgcctttagtccgggcaagcatgcgtcttttgccagcaatggtgcgctgatcacagactttgttttcgccaatcatattctgtagcttgtgagaggacagcaacaccgaattgattggcatgaaagaagctccatcagtccagcccagggtcatcatgcgaaaacctttcttgtaagtcattgatacatggtcaaaaactttggcgactaattctgttttcttgaagccggtcctagagaagtaggaatcatcgacaacaaagcaatcagcccgtttttctgaagtcaaagatcgcaagtgattattaatgatttgcgcagaaagcagtgtggtgaagtggagccaattgacgtggacgttgcgcataaatcggtaataagaatttttagaaaagctttctttaaaatgatccgttttcagctgcatatataagctgcggtcacgaaagacattgcttaaaacgtaaagaaacaagctgaacaggctaatgcctttttccttgcggaagccacattttctcaacagcttgatcacctgaaacttcttgatgaagctgatgattgagtttgaaaatagttgttcatttttttggtcaggagatggtaaaatagacattggcacaagcctttcatgcatagaattatcgtttggtcactttaattatagcaatgaaaaggtcatgtgccttttatatttgttaaaaaacgcagaatcacaataaaaggagcgattctgcgtgtgggaagtttaagttactaaaagtagaggaaacatcaataatatcaggataataatagaaataattgctaaagttttatttttacgattaagcattaatattaggtctcctatccaaagaaactgtcaaatcttttgtgtaaatagatctttctcgtaaattgattttttaattatttatttaatcaaagtaggattctaaggtgtcctgaacctgaccaaagcctttatgaattcgattgaaataacggtcattgtagctcattgcctgaatgccaataaaagcatcaagcgactgttcagttggaaactctgccttaggcttagctttgcgcttgatcacattgttaaatgattcaatcatgttagtcgaataaattgaagctctgatctgcttgggatagttataaaagaccagcagatctggttctatgtctttcaagcttctgataacatggctgtaaaccttgccccatttggtatagaagtcatgcaggacagctgtggcttcttctttgtttgtctgttgatgcacctgtttgaattcgttcatgatcttttcacgatcgtcgacgcgtactttagcgcagatattgcgcatgacatgaaccaaacagcgttgaaaatgagctttaggataagtcctggccaaggctgttttcatgccaacaacaccatcagaaagaaaaagctcaacttgctttaagcctcgggatttcatgttttgaagcatatctgtccagacttcaatgttctcgctaggcgcaatgcagtagtcaatgacctccttgtgcccattaggcttgatgccaatggcaatatagactgcttcacgctcaaatgtttctcggcgcaaaggaaggtatgtcgcatccaaatagacgcagaaaaacttgtcgcttagcttgcgtttgtggtaagcctcaacctttggaatcatctgcttggaaatatttgatacctgagctggactgtaatggctgccatacatcttttcaattagatcggctatttccctggtggtcacgcccttggagtaaagcttgataatcatgctttccaagatatccgagtgctgcttgtagtcaggcagcgtgtgctgatgaaattgaccgttgcgatcccgaggcacttgcacttcaattgggccaaattgcgtatcaactttgcggaaataagcaccatttctagagttgccagtattccagccatttctggcatagggatcatagcccagaaaggcagtcaattcagcttctagcaagttattaacagcctgttgtagctctttgcgcaataaatcatttattttgtctggattgaatagagcttgagcaaaatctttggtaaaatcattcatgaaggagttcttctttctgtatgtgtttttttgttcaaaccaatcatacgagaaaggaactcctttttctaatgtttaaagaaataaatttaaggaatcattcatccttacacaaactattttacagtctctatccaaagcgcgacttgcttttctcattaatatcattgataaagcagagataataatcagaactattgcaataacacttgcatttttccagttacctaatgtcatggcttgttggtaaatcaaggtagacattactaaatttttattacctcccaaaatttgtggggtagtatatgctgtcatcgcacctgcaaagaccaaaatgcatcctgttaaaatccctgagactaattgtggtattacaatttttatcaaattaacccatggattggcgcctaatacagcagcagcttcttctgcttcaatgtttagctcagaaatactaccaactaatgaaataatcataatcgggagaaataaataagctgaaccgatgataattgccgtatcagtataaagaatgtttaatggagaattaattaaatgaatagacatcagaaatttatttagaataccgttacgacctaaaataatgatccatgcaaagtttctgacaactgcattcgttaacattggaaaaagaatgataattgttaaaattgatcttactttgctcttttgacgagcaatccaaagtgaaattggaattccaagaattaaaacaatgatcatagtgagtaaagcaattttaaatgttctaccaattacatgaagattgtacgtgttttttagaaattcagtgtataggtgcaaaaatcctttagaatcttgaaatgttggtatagcaatctgaattaatggaaagaatgcaaaaatcaagacactaataaatgccggaaatagcagccaaaaactggattttattttcatattgttcgtattcctcgagactgtaaaatagtttgtgtaaggatgaatgattccttaaatttatttctttaaacattagaaaaaggagttcctttctcgtatgattggtttgaacaaaaaaacacatacagaaagaagaactccttcatgaatgattttaccaaagattttgctcaagctctattcaatccagacaaaataaatgatttattgcgcaaagagctacaacaggctgttaataacttgttagaagctgaattgaccgcctttctgggctatgatccctatgccagaaatggctggaatactggcaactctagaaatggtgcttatttccgcaaagttgatacgcaatttggcccaattgaagtgcaagtgcctcgggatcgcaacggtcaatttcatcagcacacgctgcctgactacaagcagcactcggatatcttggaaagcatgattatcaagctttactccaagggcgtgaccaccagggaaatagccgatctaattgaaaagatgtatggcagccattacagtccagctcaggtatcaaatatttccaagcagatgattccaaaggttgaggcttaccacaaacgcaagctaagcgacaagtttttctgcgtctatttggatgcgacataccttcctttgcgccgagaaacatttgagcgtgaagcagtctatattgccattggcatcaagcctaatgggcacaaggaggtcattgactactgcattgcacctagcgagaacattgaagtctggacagatatgcttcaaaacatgaaatcccgaggcttaaagcaagttgagctttttctttctgatggtgttgttggcatgaaaacagccttggccaggacttatcctaaagctcattttcaacgctgtttggttcatgtcatgcgcaatatctgcgctaaagtacgcgtcgacgatcgtgaaaagatcatgaacgaattcaaacaggtgcatcaacagacaaacaaagaagaagccacagctgtcctgcatgacttctataccaaatggggcaaggtttacagccatgttatcagaagcttgaaagacatagaaccagatctgctggtcttttataactatcccaagcagatcagagcttcaatttattcgactaacatgattgaatcatttaacaatgtgatcaagcgcaaagctaagcctaaggcagagtttccaactgaacagtcgcttgatgcttttattggcattcaggcaatgagctacaatgaccgttatttcaatcgaattcataaaggctttggtcaggttcaggacaccttagaatcctactttgattaaataaataattaaaaaatcaatttacgagaaagatctatttacacaaaagatttgacagtttctattcctccttatcttgtcttagaataatttaaatgtaaaaataagtcaatacaaaatatgaattaaaataataacatttgtgttaattgtatgcgtattgtattatttatgaatataaatagatttatttataaatttatcttcttgaaaatacgaacattaccaaaaaggaagtggagttcttaatgaaaaagccagttattattagtacagatccaggaatagatgacgcagttgcattagcaatatgtcttttttcgcctgcaattgaagttaaaagtattattgcaactaatggcaatgttaatgcgcaacaagctttaataaatatattgaaattggagaaatttttcggtaaaagtattcctgtagtaaaaggggtagagcgttcattagtcaaacaatctattcgagctaaagaaatacatggtaaatcaggaatggacggatatgattttccaaatcctagttttgaattggtggatcatggcatatcaccggttgccatacataaaatagttgcagcttcttctgaaaaagtaactcttattggaattgcaccacttactgattacgctctatatgttcgtttatacccagatgatataaaaaatattaaggaactaattattatgggcggagcaatgggtagaggtaattatggtatctattctgaattcaatattgcatctgatcctgaagctgcaaaaatcatttttgaaagtggattaaaaattagagtagcgcctttagaattaggtgcacaagctaaaattatgcctgaagtaagtaatcaaatacgacagttaggaaaagctggtgatatgttttacgacttatttaagaaatttcgaggtggcagttttcaaactggccttaaaatttatgatgcacttgcagcaggcgtacttttaaatccgcaaatgtttaaatttaaaaatacacatgtagaaattgatgttcaaaccggttatacatatggtgcttcattgatggattttaaaaataagctagatcttccaaataatgctgaaatagcagtgtctgtagatccagaaattttttctaaatggtttgtagaagctttatcaaaaacaagataaaaaagtcaattaattgtcaacaattaattgacggataatggttaagcgagtatactactactagttgagaacaagaagaagcacccgcttctcgcctaagttaagtaaacctctaggctgattgataatttctgttgattaaaggcgggtatgattcttataacccgcctttttcttgtcctcaaattaacacggaggtgaacagttataccaagaagtttaatcttaaacgacagaattcgcgctcgcgaagttcgtttaattgatgaagatggtcagcaagttggtgtgatgagtaaaagtgatgccttacgtcgtgcaagcgatgcaggtcttgacttagctctgatttctccaaatgctaagccacctgtagcacgtatcatggattacgggaagtaccgctttgaacaacaaaagaagcttaaggaagcccgtaagaattccaagacagtcagtgtcaaagaaattcgtttgagtccaactattgaaggtaacgacttcgaaactaaacttaagcacgttcgtaagttcatttctaaagaaggagctaaggttcgcgtctcaattcgttttagaggtcgtgccatcactcacaaggaattaggtcaacaagtacttgaaaaaatggccgaagtaacctcagacattgctaatgtaattagtaagcctaagatggaaggtcgttcaatgttcttgatgcttgcacctaagagtgataaggacaaaaagaaaaagtagttaattggaggaaatagaaatatgccaaagatgaaaacacaccgcgcttctgctaagcgttttaagagaactgcaaatggtggtttaaagcgtcaccacgcatttactggtcaccgtttccacggtaagacaaagaagcaacgtcgtcacttgagaaaagctgctatggtttcaaagagtgatatgaagcgtatcaagcaaatggttgctcaaatgcactaatacttgttcttaattaagacagactatagtaggaggaattttaaatgccaagagttaaaggtggaacagtaacacgtcaacgtcgtaagaagatcatgaagcttgccaagggttaccgtggcgcaaagcacatgcaatttaaggctgcaagcactcaattattcgtttcatacaagtacgcattccgcgaccgtagaagacgtaagagtgaattcagaaagttatggattgctcgtattaacgcagctgcaagacaaaacgacatctcatattctaagttaatgcacggcttgaagttggctggtgttgacatgaaccgtaagatgttagctgatattgcttacaacgactcaaagacttttgcacaattagcagaaactgctaagaaagctttgaactaataacaaaagaaataagctagggaaattttcctagcttatttttttatctatttttgaattaatgctcgtaatctaattttttcatctggcgtagtaaaggccgcgtcaaccgcgttgagataaagagtggtttcttcttcaggagtcaaggcggtcttttcttcaagcagttggtattcatgcggtaaattggtattggaaacgatcatatcatcagaatttagcgtgactttcattcccatgtgcaataatttttttattgggtaagaatcaatctgatcaaaagctttggtgttcatatttgaagtggcgcaacattccaatatgatttggtgatcaatcagatattgggtaagtgctggatcttcagtgcagcgaatgccatggccgatccgtttcgcgccaatttttaatgcttgacggattgaatcaggtcccgcagcctcaccagcatggatggtataaggaaggtgtaattcttgggcacgattgaaaaaatgctggtagttaatgttagggatcgggccttccgcaccagctaggtcaaggccaacaacgccatgacctaaaaattctttcgctagctcaaccgtttccatgttttctttttcattgtgggcgaagcgcatcaaacagagaattaaaccagcgtgtaattcaggctgatctttgtctgctttttgtttttgataaaacttcgtaataccgctgactgctgcagcgattacttgtctttgcgttaaaccatttttagtatgtaattgcggtgcaaagcggatctcggcgtagactagaccttgttgttttaattcgcaaagaagatcaaacacaatcatctccagatcatgctttgtcttcattaactggttaggtaagtcaaacttttccaaaaattgttccaagctagcgcaagaattatcaactgacaattcttgccgcaatttttgatcagttaactgtggcatgtgatgttcctgcattaacttcttaacagtagcaactgggacagaaccgtcgaggtgaaggtgtaaatcgatgaattttctcatggtgatcctttctgttgattgatgattttgcttaaattgtttagtattgtaacactttttcatcagaaaaaaacaaaaatttctaaagcaaacccatttttgatatgatataaggtgataaaaaatggaggaaattaacagttaaaagatagacaagatacaaagatctgttcagaaatataaaacatagaagcaggtcaaaaactaaaaatttaatattttgttcgcttgtatttatttcactctttgctaaatttatgtttgtattggaggtgaaacaaatgatcaaggctcaagtagtcgaattaaaacctaacaagaccatgcaacaagagctggataagctttgtgattatcgcagatattgctggaatcaagctttagccacttggcaagatatgtatgaagcacgaaccttagataaggataataatcccagtccaaatgagcgcagaatacgtgatgagctagtcgataataaggcagactggcagtttgctctgtctgctagatgcttgcaattagcagtcaaagatttggctaatgcttggaagaatttctttgataaggcacagcctgattttggaaaaccacatttcaaatcaaagaaggccccgcgacaaggctttaagactgaccgggctaaagtggttaatggtaagctacgcttagacaagcccagaggcattaaaacctggttcgatattccaacatatgaagctttaaaaatgaagcaaattaaagttgctagtgtctttagagaaagaggacattattatgccgctctttcttatgaagaagaaactttggtaaagcctagaacaggtagaaagacagctgttgatgttaatgtgggacatttcaactacactgggggcaaaatcaatgttttgccatcaagattgcaaaaactatacaagcgcattaagcattatcagagaatgctggctaagaaaagacgggctaatggcaagttagctggccaaagcaataattacgtgcaagtgagaaccaaactgcaacgtgattatcgtaaagtagccaacattcaaaacgatcttttgcaaaaattcactacaaaattggttaataattatgatcaaatagtgattgaagacctagccgttaaacaaatgatgatgacgcacgtcgcttcaaaaggcatgcagagatcattattcagtaagtttagacagatattgacttataaatgtgagtggtatggcaaagaattaatcttggctgataaaacatatccatcaacccaaagatgtgctaattgtggttatgttaaaaaaggtgatgaaaaaatcactttgcaaggcaaccaaaaacatcacactaagcacaatgagtatatttgttatgaatgcggttatactaatgatcgtgatgataatgcagtgttaaatcttttagctttagcaaaataatgaaaacggggctggctaagcccttaagctgcaagagttagtcaatgcgattactcctagattggaatattggaatactaatgatgacagcagtaaataaagcgaagaaaggaaggactatatttctttctgatatgtaaaaaaatatacattcttctacatatttctatgttttatatagcagtgttgatatgctttttagaccaaaatatacaattgatacgatttacaatctggacccccagaagttgaatgaaatggacattaaggcggttttttcagacctagataatacattgctcgcctggaataaatttgaaactgccaaagaaatggataattttaatcaaaagttagccaaggcgggaatcactctcgtggtcatttctaacaataatgctcaaagagtgggcaaggtacttgatccttaccatatcgaatttgtcgctaagtcacgtaagccattgccatttgcgatcaccaagaagcgcgaagcaatgcatttgcaaaaagatcaggttatgatggttggcgaccaactaatcactgacatgcaagcagggaatttggccggcgtgaagactgttctagttaagccattagttgaaactgataagtggaatacgagaatcaatcgtttctttgaaaaaattatctttttcttcctgggtttatcacatcgagtaacatttaagaaggagctatcaaatggatgaggatattatttgtatcggctgcggtgccaagctgcaatccgatgatcctgaaaaagcaggttatctgccaaaaagtgcactagataaggcaaagcaagaagaaaatgcggatgtttattgtcaacgttgcttcagattgcgccattataacgaaatcatgccagttgatttgaacaacgatgattttttagctttgcttaactctttaggacaaaagaaagctttaattgttaatgtagttgacttatttgatttttcaaattctttgctatcatcattgaagcgttttgttggaaataatgattttattttagttggtaataaatttgatctatttcctaaaaactctaagcaaagtaagattaaggattggatgagacaagaagctaaccgaatggggctttatcctaaggaaatcttcttggtttcagctaaaaagaagttgaacttggaagatttgatcgcttatattaataagcaatcgcaagacaaagatgtctattttgtagggacaactaatgttggtaagtcaactttaatcaatgccattattgacatgatgggtgatattcaagacctgatcaccgcttcacgctttcctggaactactttagacaaaattgaaattcctctagaaaatggtcactttttgattgatacgcccgggatcatgaccgagaatcaattggctacgcacttaaatgctaaggatttggagctggtctcacctaagaagcctttaaagccagctacttaccaattattgcctggtaatactttattcttagctggtttgggacggattgattatctcaagggcgaatcgactagctttactgtttacgttgctcgtggaatgtatattcaccgtactaagacagctaatgcggatgacttttataaaaagcataaaggtgaattgttatccccaccagctgcagatgatgaaatggcaccactaaagggtcaagaatttagaacggaatataagagtgaccttttatttggtggaattggttttgtgactgtacccaagggatgcgttgttaagacttacacaccagatgggattggtttaggtattcgtcgtgcattgatttagaggtttgcatatggttaatccaaaatgtattgaaaaaatgccaactgctaaagttgaagcagaattggaacaagaacaaggtaaaggtcgtcagattgggattatgggtggtacctttaatccggtgcatattgcgcacttggtagcggcagagcaagcaatgactaagttgaagctggatgaggtctggtttattccggataatattccaccgcataaaaatgctccgctgacttctgctaaagatcgggcaacgatgcttgatttagctacgcgcgataatcctaactttagggtaaaactattggaattgttccgaggcggcgtttcttatactgtggatactatgcgttatctcaaggaaaaagcacctcagaatgactattatttgattatgggcagtgatcaggttaacagtttccatacttggaaggaagctccgaccctggctaaactagtaacattggtcggaattcgtcgtccaggttatccacaagatccgcaatatcccatgatttgggttgacgcaccagatattcgcctaagttcgactgctattcgtcgcagtgtcgcaactggcacttcaattcgttacttggtaccagaagccgtcagagaatatattgaagaaaaggggctttaccttgacgaaactaatttttaaaaatacttattcaccattctctagtgaacaaattgttgctaaagaaaaggcaaacatgaagaaaaaacgttttgaacattgtgttcgtgttagtgaaactgcacgtaagttggctaagttaaatggatatgatgaagaaaaagcagccttagctggctttgttcatgattatgccaagcaggtaccggtagaagagtatcgtaaggtaattaaggaacaggattttgatccagatttgcttaattggaatcgggccatctggcatggcattgtggggattttctttattgaacgtgatttaaaaattagggatcctgagattttaactgccgtacgtcgtcatacgactggtgatactaagatgactacattagataaaattatctttgtagctgattttattgaacccggacgagattttccaggagttgaagaagcgcgcaaagttgcttatgctagtcttgatgaaggggtaggctatgaattgcagcacaccttagagtttttaattgaaaataaaaataaagtatatcctcgtactttagaagcatacaatgtatggggaattaagtaataaaaaggagaaaaatattgactagtcaagaaattttagattttactacccaagcaattagtgaccgtcatggtgaagatactgaagcttacgatatgcgtggaatcagtattttagctgattactatgtcattaccagtgcaggctctaatcgtcaattacatgcgatcgttaactcaattgttgatgcggctcacgaaaacaactacactgactaccgtattgaaggtaccagagattctaactggcttttgctcgatttaggtgatgttgtagtcaacgtctttactaaggaagcacgtgaactttataacttggaaaagctatgggctaacggtaagcaagttgaattgaaggaagattaagcaatgagtgttgttgggattattgcggaatttaatcctttccatagtggacatgagttcttgctaaatcaagcacgcttggttgctggtaatgatccaattgtggtgctcatgtctggtaactacgtgcaacgtggtgagatggcgattatgagcaagtgggagcgggctaaggtggctttgcaatctggtgccgatttggtatttgaaacaccattttcaacggcagtagaaccagctgatctttttgctctcggaaacattgaacaacttgctaaattaggcgtaactgatttagtctttggtgtagaagatgctaacctgaattttgcttatttgggtaaaagaattgcggaaattccccagaatcacatggattttagagattatagccaaacttattcaacacaatacaaccaaatggtagcgcatgaagtaggctatgaagttaatcagccaaatgctattttggggttagcgtattcagtagctaatcataatttaggttcaccattaaacctgcatccggtcaaccgaattggagcaggacatgatgaccttttacaaagagaaaaagttgtccaaagtgctagtgcgattcgaaacttattattgcatggtgaagatacaaaaaatttaaagtattggatgcctaaagcagaagcaatggtgttagctgagcagaaaatttatcctaattggaatttgctatacccatttttgaagtatcgaattgaatcatcttcagttgaagaattgcgtcatatttatcaaatgagcgaagggcttgaatataagatgaaacaagagattcatttagcccgcgattttacagaatttttgcggcatatcaagtccaagcgttatacttattcccgtttgcgccgtttgagcttatatactttgcttaatgtcactcaggatgatatattggctagctttaatcatgagtctttgatgctcttaggctttagtaaggtaggtcgcaaatatttaaagcaacagcgcaaggaatttcagacagaaatcgtctctaaagttgataaaagaagtgctaagaacggctctttagctttacaagttagggtagaccgtttatttgaacaaataatgggcgttgatcaaaactttggtcgacggccaatcgaggtgtaaaaatgttagaacttagtttttctaggattcaaaattccaaggaaccattaactcacattgaacgtgatttggaaatgcgtccagaattttttaagcgtagtaaagatctactaattgatgcgaaaaatgtaaaagtgagcggtgacttgttctatcaagaaccatttgtgactggcagttttcatgtggccgctgatctggttgtgccatcaagcagaagccttaagccggtaaactatcatgaagattttacttttactgaaaactaccttgatcgtaagccaaccaaggaagaattggaagaaaacgatactattgtacaagttgagaatgatcaaattgacttgcaaacagcggtagaagataatattttactccatattccaactactattttgactcctgaagaaaaagaaaagaatattttcccagagggtcaaggttgggaagttgtttctgaaacctcttttgaagaaggcaagaagaaccaagttaacccagcttttgctaaattgaaggtcttgcttgatgggcaagataatgataaggacaataaaaataagtaataaatgtaattgaaaaatatggtggacaatcaaagaaaatttttactttgattgttttttaatcttgtgttagaagcacttttaaagtatcctttaattataaaagcattttttaattaatttattagtattagaaaaccaaattgatctacgaggaaatgaattaacatggcaaaaattctaattattgaagatgaaaagaacttatctcgctttgtcgagcttgaattgcaacatgaaaattacgagactgttgttgagaataatggtcgtaagggattagaagatgcattgagtcaagactttgatgctatcttgcttgacttgatgttacctgatttaaatgggttggaaattgcacgtcgtgttcgtcaagttaagactacgccaattatcatgatgactgcacgtgattcagtgatcgaccgtgtttctggtttggatcatggcgctgacgattatattgttaagccttttgcaattgaagaacttttagctcgtcttcgcgcagtgttacgtcgcgttaaaatcgaaaaggacgcatcaaaggttactgttgctaagcaaaagattgtaaaatttaaagatttgacaattgaaactgctaaccgaattgtgcaccgtggtgatggcaaggcaatcgatttaactaaacgcgaatacaacttattaatgaccttgattgaaaataagaacaacgtagttagtcgtgatcaattattaaacaagatctggggtccagaatctaatatcgaaactaacgtagttgaagtttatgtacgttatttacgtaataagattgacgctccaggtcaaccatcttacattaagacggttcgtggtaccggttatatggtaagagatgaagatgatgatcaagaataaagacgaggaaaaagaggccaagcactcatccctaattgtgcgatgggttagtatcgttgcattaacgattacggtctcttttgtcatattttcagttgttgcctatcaaattgttagtcatcaatcgatggaacagcaacaagagacatctaataatgtagttaccacgatggaccggacattaagttctattcaagatgagctagagatctcaaatgtaattcctgctctgtcaccgtctaccaggcgtattttgaggggcggtcctgctattagcaaaaaagatacagagaataaagcatttagtgatagcctgatttcatcgatttcgaatccagatattaatgtagcagtttacaacaaacatgatgaaattgtttttactaatggtaattctgcacctaagctaaaagaatttgccggcaaccaacttgaagaagtagtaaaccgaaaaaaaggcaaaatgcttttaacctaccagaaaatctattctgaggtaaatggcaaattaactggctatgtagtggtttctaatagtatgacttattacaatagcttgatgagtaatttgcttcattggatggtaattatttcactgattgcaataattatcttcattgcaatttcttatattttggttgttaatgtagttcggccaattaagacgatgtctaaggtggctaaggaagttaatgctgatcctaatagtgaggctagaattaaggaactacatcgagatgatgagttagaagaattagctacttcgattaatcaaatgctagaccggatgcaaggttacattgagcaacaaaagcaatttgttggtgatgtctcacatgaattaaggacaccagtggcagtaattgaagggcatttgaacctgcttgaaagatggggcaaggatgatccgcagattttggatgaatcaattaaggcttcgttgcaagaagctgatcggatgaaacatttaattcaggaaatgcttgatttaactcgagccgagcaaatcgatgttcaatatccgtatgaagtaagtgatgttaatgaaatcatccgcagagtggtcgctgatatggcaatggttcatcctgacttcaagattcagctggatgaggatgatttacctgatgatacagagattcaaatgtatcacggtcatttggaacagttgctagtaattttgatcgataatgggattaaatattcgactgatcgcaagcagattaatgtttcagctggtgtaactaagaagaatgttaatattattgtgcaagactttggtgaggggatttctgaagaagatcaaaagaaaatcttcaatcgcttctatcgtgtggataaggctagaacccgtgaaaaaggtggcaatggtttaggtctatcgattgcacaaaaattagttgctagttataacggaacaattagtgttgaatctgttgagggtcagggcagccagtttaaattgaagttccctcggttgactaagaaaaaagccgctaagttaagaaaattaaatgagaagaaacaaatgcctaagagcaatcttgaggcataaacaaaatcctattaaatcaaggtttgggtaccaagatttaataggacttttttctctagaggcttaggtattagaaaataagaaataaaatgcttcgaaaataattataatttttattaatttaagcgatataattagctaaaaatatttaaagttaagggatgtgacataatgaaagaacgcattttttcaaggaaattttggcagaaagtttttaactatcaattgattatctggtttctcttgatgattagttatactttttctcagcggaacaatcatttttattttataggggatttgttcaatctagcttttagtacggcgatcatgggattgaacttttacgtgcaatttaaaaaggattccagcaagactaatactcaaattgttcgctggctgaccatagtaatttttgctaaatttggcatatcactgggaatttcttgctaaaaaacctgccggctatcgagattctattagtattactgctatgggcggtttatattttcttgctagttccaattgcagttgtacatgttggaccgattaaaaattggtttttacgcttgctaactatttactttcttgatattcagtacggtgatgcacaaaatttagcaataaatccagatttttgctggcttcattcacttacttatcaaggtgtaatcgcagctattgctttattaacgatgacttgtttcttagttaaagcttggggctatcacttcaatccaaacttaaaatttattaaaagttcaagctttcagaagaagatcttgctggctttattgatcatggcaaccattgatttgttttacaatattcctaatttaactgcagccattgagctcggaattttggaagaaaccgaacgctatttattgatcgtaatttttttagctggttttaatagattcccaaagtatcgcatccctgttgcaatctatggttcagcaattttgttcggccttagtcatttaagtaattttggctggcatggagaaagttttactgcaacaattgcacaagttattggcgtaatggggagcgcctttatctgggcagaattgtatctctatacaggaaaactatggttgccgatgatctatcactttttaatggattatatttctgatttgcaatctggttggaattctgctggctggtcttggaatggcgaaatcactgattatatttatactgtattaattgttggcgttccattgctattctcaatttggatgcttttcggtaaaagaaggcaagtaatggaagataatgcagatttgattttggatctaaacggtaggcaaagcatgatttagcagtgacttatattaaagggactataatgtatatgcaagggtaaaataattaagagaggtcataaattatgaaacttaagagaattgtattaagtattgtggctggaactgcgcttttggttcctgcagctttagcgggtcaaaatcaattaacaccggtagttcgggcaagtactctgaagaataagattacaactgttaagagctataccaatccaactttgtataataagaatggtaaagagctaggtagccaagatcggataaattttaagaaaccgatcagtttttatgggcaacctattgttattcagggacccagggtcaatgcttttattaatcttaatgggatgccacaagctattgttaatggtgaaacctatgcagatttaggtgatggtggttatgtcaacatgaaatcggttggtagctataactggaataataatgagatcggaattattaaaaacacctatatttacaatagcaagggtaatcgtttatcaacttatcgcggtggcaaggcttatttaactaaaggtagcaagattaaatatgctggtaaaagttggactacttatcctgattcatattttaatttaggtgatgggacgtatttaaagtctaataacgttaataccatgaatggcaaaggcgttttgaagctgaatgctaacactgctatttataataagaatggcaagcgtattagctttaatggacaacaggtttttcctaaatactcaattataaattatgctggtaagcgtcgcactaagacacaaactgacgattactattacacaaacttaagtggtagtaaatcatatgcaattaagaattataagattaaaggtcaagactattattacattggcagaggtgcttatatcaaggcaatgaatgttggtcgcatcaatggcaatccggtatttcgtgatggcggtgcaactacgattgttccgcagacagatttgtacatctataattctaaattaaagaaaaccaaacaatctgttaagaaaggacaaaagattagagctttagatccagttgttcttggtagtggtgatattgcccaactattttacagaattaagggaacatctaactatgtttcctggggtgattatagtgagtatggttttgaagatgatgagcacgtgggctacttcaactttcgtgttagattaaatcctgttaaaactattgaaaatgccgctacacgggccgctgaagaatcagattaattgggagtgaagacgttatccatttggatagcgtttttattggattatgaaaaagaattaatctgaagtgtctaggaaaactctaaaaattgaaaactcctactaaatcttggcataataagccttgatatagtaggagttttgttttgagttaaagccaaaaatcgattaaaaatagctttttctcagatacaaacttaattttttctatagagatctttcttcaaacaaatgaccataggaacttaaaattctagctaaatccgtccaagtaagactgatagttttggtattatcattgggatggacgccaacataattattttcctccatggccgcttggtctacaatcaagggaatagtgttgctagaatcattgagtaagttaaagggtgaaaccgtaccagatttaaccttgagtttttcctcaagttcatcttctgaagcaaaagttagactaggagaaagtaattcactttgtgcttttttccagtcaacttttttattctcaggcaatatgagtaaataataattttttccgttacgcgatttaataaaaagagtcttacatttagtaaaatcttcatttttcaagtatttatctgcttctttagttgtataaactgctggatgagaaaaaacttggtaactaatatcgtgatcatctaaaagttgtaatatttcttgagtatgcatattttcctcctaataaaaaagtcaggattttactcctgactgataactatttacgcttttgcttacctttattacggttacgtaagtcttggtgtagttctttcttagcttcagttgtagccttgctttgaccgctattggagttaaacaaagcatccactttttctttagtaacaacagtttcaattggcttatcttttaattcatcggcaatatgcttcttaacactaggtgtaaggacaaaggtaacgattacttgttggacaatcattactaagttaccagcagcccagtaaagagctaaggcaccagagaaggataaactgaagaacaaagtcataattgggttaacaatcatcattgattgcatggtcttcttttgttcttctggaataccaattagtgagatataaccttgaataacggtaaagacagtcgcaataatggctaaaacaacagatttggaacttagagaaataccaaagaatttggattgtgccaattgaggtgaatagaataccgcttgataaattccccacataattggtaactgaataattaatggcaagcagcccattccaccagttaatgaaacttggtttttagagtaaagctctctttgccaagttgataaagtcatttgttggtcaggggtgatccccttatgtctcattgcattttgaatcaacttcatttgcggttgcagacgagccattttttcctgttgacgtacactcttgttttgctgtactaacatcaatggcatcaagattacacgtacaactaccgtaataatcacgattccccaaccagcaccattatcgccgccaatcatttgcgcggtttgaatcatgatattttgtaaaggtcggcctaaccattggtaaacccaaccgtaaataccgctgtgcggtgcaacatgtggatcagttgttgccccacaggcacttaatacaagagtagctactgctaataaagccagtactccagcgtatcttttaatttttttcatttaaataaatcaccacttaatttctatctaaaaatgtatgtctctaatataatacatgaaaatcatgcattttttctacacctggaaccgattcttgactaatattttgaatttgggcaaatccagatgcagtaggtagtttttcaataaagcggtcgattttatcactgtctgcttgtaaatagattgtaacggtaccatctgcattatttttaacagtgccaggaatacccatcttgttagctaatgccatggttgaccaacgaaagccaacgccttgaactaagcctgaacaaattaattttcttgtttccatttttatctcccttatttaaattaagttcaactttgattttagcatgatcaaaatagattatcagttataatagattttgaatacaaaaaggagaaaaatatgcaacaaattagttcagttaataatgcaacgattaagaaattagcgaagttaaagcaaaagaaataccgcgatgatgaaggcttatatttaattgaaggctttcacttatttgaagaagcacttaaagctggtaaaaaatatcagtatatcttaggtactgaagaagcacttgatcaagcagatagtgaatatgaagttaatttaagtgggaagaatgtcgtattaattaacaaagcgattgctcgccacttaagttcgactaagaattctcaagaaatttttatggtattaaaaattgatcaaccaaaagaatttccgtttaattatggcaagtgggtgctgcttgataacttggctgatcctggtaatgtggggacgattatcagaactgctgatgctgctggttttgatggggtagttctttcaccagagagcgctgacctgtataatcctaaaacgcaacgtgccatgcaaggaagtcaattccatatcgatttgattaagcgtgatctagctgatgtgatcaccgattttcaggatgcaactattccggtttatgcatcgctgcttgatcgttctgctaagcaattgcctgatttcgaaaaagtgccacaacttgccttaattattgggaacgaggcgcatggcataagcaaaacaattgcttctttagctgatgaaaagctttatattccaattaaaggacaagctgaatcgcttaatgccgctgttgcagcagggatcatgatctatcactttgcttagcacttgtaattagtaagtagatctactataataattttagtaatactaaaaagtattttatataatagtatttttactggaattatataatacggagggacttacctatgcaagaagttaaagagaaaaaggacgcagctccttgtaaaccagaagattatgaattatgtggtcattttgttagtgcgtttaagattattggcaaaaaatggaatggcttaatcatcagttctttgtgtgatacacaagatatgcgctttaaggacttggcacgaactgtcgaggcttgcagcgaccgtgtcttagttgaacgtttgaaggaacttgaaaaggacgatattgttaaaagaagcgtcgatcaaagtaccggtattatttcatatggtttgactgaaaaaggtgcggaacttaagcctgtttttgatcaagtacataattgggcagataaatgggcttaagctattgacattaagtaagcatagaagtatattacttattgtaagttgcttatttaaaataagattaggtgaaaggagtacgaaaatgaaatctttaagtatgatgaatgttaatactgactgttgttcttgtgtatctaacattatttttaatactcaagaactcagttttcgtatttccgaatagctttaatccagagatcaaaaagatttatgttagctgaaaagacgtagatcttttttatattgtttaaagagacctatgggagtaggtctttttttgtatgattgggggatttttaatgaattggacagttatccagcaagctctaccaatatttgcgcgcggctttgaactgaccttatggctttcattgattggcattgttggctcaattatcgtgggcattattgtcagcttagtacaatattttaaactaccagtactaagtcaaatttcaacggcatatgtcgagctagctagaaatacgaaactgtcaaatcttttgtgtaaatagatctttctcgtaaattgattttttaattatttatttaatcaaagtaggattctaaggtgtcctgaacctgaccaaagcctttatgaattcgattgaaataacggtcattgtagctcattgcctgaatgccaataaaagcatcaagcgactgttcagttggaaactctgccttaggcttagctttgcgcttgatcacattgttaaatgattcaatcatgttagtcgaataaattgaagctctgatctgcttgggatagttataaaagaccagcagatctggttctatgtctttcaagcttctgataacatggctgtaaaccttgccccatttggtatagaagtcatgcaggacagctgtggcttcttctttgtttgtctgttgatgcacctgtttgaattcgttcatgatcttttcacgatcgtcgacgcgtactttagcgcagatattgcgcatgacatgaaccaaacagcgttgaaaatgagctttaggataagtcctggccaaggctgttttcatgccaacaacaccatcagaaagaaaaagctcaacttgctttaagcctcgggatttcatgttttgaagcatatctgtccagacttcaatgttctcgctaggtgcaatgcagtagtcaatgacctccttgtgcccattaggcttgatgccaatggcaatatagactgcttcacgctcaaatgtttctcggcgcaaaggaaggtatgtcgcatccaaatagacacagaaaaacttgtcgcttagcttgcgtttgtggtaagcctcaacctttggaatcatctgcttggaaatatttgatacctgagctggactgtaatggctgccatacatcttttcaattagatcggctatttccctggtggtcacgcccttggagtaaagcttgataatcatgctttccaagatatccgagtgctgcttgtagccaggcagcgtgtgctgatgaaattgaccgttgcgatcccgaggcacttgcacttcaattgggccaaattgcgtatcaactttgcggaaataagcaccatttctagagttgccagtattccagccatttctggcatagggatcatagcccagaaaggcagtcaattcagcttctaacaagttattaacagcctgttgtagctctttgcgcaataaatcatttattttgtctggattgaatagagcttgagcaaaatctttggtaaaatcattcatgaaggagttcttctttctgtatgtgtttttttgttcaaaccaatcatacgagaaaggaactcctttttctaatgtttaaagaaataaatttaaggaatcattcatccttacacaaactattttacagtctcagaaatacaccgcttttgattcaacttttctttttgtattatgcttttccagtaattggcttaaaaatgtcggcagaagtctgcggcattatcggtttgattttcttaggcggcgcatatatggctgaaggctttactggtggctttaatggtgtgaatcctagtcaaattagtagcggtaaggccttgggaatgaataattttcaactagctcgttatgtggtttttccacaaggattcagcttaagtatgccagcattaacggctaatattattttcttaattaaggaaacctcaatcttttcagtaattgcaataccagaattgactaacactgctcttgacttaattggaatgtactatcggtcaaatgaatacttactgatgttagtagttgcatatgcaattattttgattccggtgattttattattaacttggcttgaaaggagagtacggtatgcttcattcggggattaatgttttatttgaagggagtaactttgctcgcttgatggcaggactatggacttcaatttggattgcggctttgtcattaattatcggcttagctgtgggtacaatttttggtatcttaagaacgctcaaaaatcgaccgattcgctttgttttgcgcctatacctggaattctttaggatcgtgccaactgtagttttactttacttagtttattacatcttgcctagaagtttgcacgttaactggccagcaacttggatggcagtcttagccttttcaatgtgggtagccgctgaatttagcgatatcgttcgtggagcactagaatcagttcctaagacgcagcgtgaatccggcttagcgttggggctaaatcgcttgcagctatttcgctatgtattattgcctcaagcggtcaaattagaattgccagcaacgatcaatttggctactagagtaattaagaccacttctttgttaatgattatcaacattatggaagtgatcaatgttggtcaacaaattatcgaagctaataaccaacaatatccagcaggcgttttctgggtatatggttttatctttatcttgtactttattttagattatccattatctgcatgggcaaagcgtttaaccgctaaaaattaggtgaatgaaatgacagaagaagttttaagagtagaacatttaaataaattttatggtaaacatcagaccttgtttgatattaattttagtttgaacaaaggcgaagtattgacgttattaggaccatctggttcaggtaagagtaccttgcttagaaccttaaatggcctagaagaatatgaagacggcgcgatttatttccatggcaaaaagattaatcctagtccaaaggaatggcaattattgcggcagaagattggcatggtttttcagagttatgatctgttcccaaatttgaccgtaatggaaaatattttgctggcaccggtgaaagtgcaaaagcgtgatgaagacgaggttaaagaagaagcagtcaaattactaaaacaagttggcttgtcggaatatggggatgcgtatccgcgtgaattatctggtgggcaaaagcaaagagtagctattgtacgagctttagttatgcatcccgaagtaatgctttttgatgaaattaccgcttcacttgaccctgaaatggtgcgcggcgtgttagatattatgcaaagattatctgatgatgagcatataacgatgatcattgtaacgcacgagatgaactttgctgctagaattgcagataaagtattgtttttagaggatggaaaaatcttagaggatacaccaggcaaggaattctttgccaaaccgaaaacgaaacgggcacaagaattcttagaaagtatggatttttaggtgtgaacaatggcaaaaagatttttaactggattatggctatcctattcgtagtagtagtcttggttgcaggctatattggcattagccggccaggcatcaatggcactgcttcaggggatagatggaatagtgaaaataatgtttcttcaattaaaaggcgtggttatctaagaattgccgtttttggtgatttgccgccatatggctgggttaattcacaaggtaagcgtgttggttatgacgtgcgtctagcgcgcagagtagctaaggatttgggtgttaaacccaagtttattcaggtaaatgccaataaccgaattgataccttgaattcaaataaggcggatattgttctagctaacttcaccttaacgcctgaacgtaaaagtgtggctagttggaccaaaccatacatgaaggtatcagtcggggtaatttcaccaaagtcagctcctgtaactaatgctaagcagctaaagggcaagagtgtaattgtgactaaaggtacgacagcggaaaattactttactaagcaaaaaggcgttaacttgctgaagtttgattccaagacccagcagtttaacgcaattaaaaacggccgtggcgcagctttagccgatgataattcttatttgtatgcttgggttaagcgtaatcctaagtttactgttggaattaaaactattggccctaaccaatacatctctggtgcggtgaagaagggcaacaagtcactgcaaaaatggatggatcgtgaaattactaagctgaaccgtgagagcttctttacttatgattataataaagaattgaagccatactttggtaaggaaatcagacctagtgacattgttttgccgcagggaaaataaaaaacttgcaagaaacaagtaaaagaaatatgataatagttaattactaagatcaagactagtaacagattatttttctaaagagagtcttctttcaaaagctgcaagagaagatagaaaaagtctgtgaatttcatcttgggagtaggatctaatcaattccggtatttcaccgttaacgaaaacttaagtgtgggcgttgctacgtccaaactagggtggtaccgcgacgcttcgtccctattggagacggggctttttttgttttgaaaggaaagatttaatggacttatttgataagttaaaagagctccatgaagaagggcttaagcaaatcaacaaggctaaagacgaaaaaactttgaatgatgtcagagttgaacttgttggtcgtaagggcgaattaactaagattttgcactcaatgcgtgaagttgcgccagaaaatagacgtgaagttggtcaaaaggttaacgaattacgtgacttgtttaatgctcaattagatgaagctaaagaaaacattgttcatgcaatgttagttaagaagcttgaagatgaaaagattgatgttactttaccaggtcgtgaagcacatcttggttcaaagcacccaatcaacattattttagatgatcttgaaagctactttattggtatgggctatcaagtagttcaaggtccagaaattgaaactgatcactactgctttgaaatgatgaatatccctaaggatcacccagctcgtgacatgcaagctactttctacattgatgatgaagatttgcttagaagtcagacctcaggtgatcaagctagagtcctagaaaagcacgacttctcaaagggtccacttaagatggtgggaccaggtaaggtataccgccgtgatgacgatgatgcgactcactcacaccaattcatgcaaatggaaggcttggttattgacaagaacgtaactatgagtgatttaaagggtactttggaattaattgccaagcacgtttttggccaagatcgcgaaacccgtcttcgtccaagttacttcccattcactgaaccatcagttgaaatggatgtatcttgctttaactgtaatggtaaaggctgccctatttgtaaatacactggctggattgaagtattaggtgctggtatggttcaccctaatgttttggaaaatgcaggtgttgactcaagcgtttacggcggttttgccttcggtgttggtcttgatcgtttcgctattttgaaatacggtatcgatgatattcgtgacttctacaccaatgacgtacgtttcttagaacaattccgtaaggaggaaagataattaatgttagtttcatacaattggctaaaagattttcttgatttagatggtcaagatccatacgaattagcagaagaaattactcgtagcggggttgaaattccagaccgtgttcatccaatggatggcttgaagaagttagttgtcggccgtgtccttgattgtgaaggcgttgaaggtactcacttgcacttaactcacgttgatgttggtgaagacgaacctttgcaaattgtctgtggtgcacctaatgtagctgcaggtgaagatgtgattgttgctcttcatggcgctcgtattgctggcaatgaaaagatcaagaaggggaaaatccgtggcatggaaagttacggcatgatctgtggtttacaagaaatcggctttagcgatagcgtggtaccacaagaatttgtcgatggtatttacgtattcccagcagatgccgaagttaaacctggtcaagatgtatatgaagcacttggcatggatgattacattttgaacttcgacattactcctaaccgtgctgatactttaggcatggaaggtgccgcttatgaagtcggtgctattatcaaccaaaagccaaaggttgaagaaaaggttgtcttaaaagaagatggtccagcctggacagattcactcgatgttaaagttgatgaaaagcttgcacctaagttttacttacgtaagctcgagaatgttaagattcaagactcaccactttggttgcaacgtcgtctttggaatgcaggcattcgtccaattaacaatgtagttgacgttactaactatatcatgctgttaactggtcaaccaatgcatgcttatgacgctaagacttttgctaacggaaagtttgaagtaagacttgctaataagggtgagaagcttactttgcttaatgaaaaagaagttgaccttgaccctaaagatatcatcattaccgatggtaaaaagccagtaatgatggctggcgtcatgggtggacttgattcagaaatcacttcagaaactaccgatgtcattcttgaatcagccatctttgatccaactttagtcagaaaggcagcacttcgtcacgctaaccggaccgaagcttcaagtcgctatgaaaaaggcgttaactgggatgccactgaaaaggcaattaacatggctgcgcttttacttagaaatgacgctgacgctactgttgatgaaggtattcttaaggcaactgaccaaaagcgtgaaccagttgtggttaaaactactgcttcatacctcaataaagtattgggcactaagttatcagttgatgaaattgtaaagatttttgaccgtctttgctttaaggtagatgttgatggtgataatttagctgtccatgtaccaaatagaagatgggatatttcaatcccagccgacttagttgaagaagtaggccggctttatggctatgacaaccttgaatctactcaacctgttttgccagaaactcatggtggctactcagaaaaagaagaaatgatgcgccgcatgaaggcaattgttgaaggacaaggcttgatggaagctatttcttactcattgacttcacctgaaaaggccgttcgttacactaaggatccaaaagaattagttgaagttaaatcaccacttaactcaagccgttctgcaatgcgtgagaatttgatgactggattggtagatgctgctagttacaactttgctagaaagcaaacacaattagctttatttgaacaaggcagaacttatgaccatgatggtggtaaattcaacgagcatgaacatttagcagctatttactctggcaatacttttgcggaaaattggcaacatttaacccaaaaggtagacttctactttgttaagggacagttaaccaatttgttcaatgcaattggtattggtcctgaaaaagtggtttatgaggctaaaggcatcaaggggatgcacccaactagaactgcaggaatctacattgataagcaatatgttgggatgatcggaatgattgctcacgctgtaacgattgctgataaggcacttcgtggtagcgagctttatggctacgaaattgatctcgatacaattattccaatgttaactaagggcgtaactgcagtgcctgcacctaagttcccagcaattcaacgtgacctttcacttttagttgataagccagttactaaccaagaaattgaaaacgtcattaaatctaatgctggtaagtacttaactgaacttaaggtaatcgatgtttatgctggtgctcacattgatgttggtaagaagagtattgcttacaacttaaccttcttgaacagaaaagatactttaaccgacgatgttgtcaataacgcgatggataagattgttgctgctcttgaaaatgatcttgcgattaaagttcgttaaaggttgacattattgacgtaaattaatattattgatcagtgcaagataaagaaaattaatttctgaggagttaaaaatatgcctgaaaaatcttatccaatgactgctgaaggtaaagaaaaacttcaagcagaattaaagaacttaaaattagttaagcgtccagaagttattgaacgtatcaaggttgcacgttctttcggtgacttgtcagaaaactccgaatacgatgcagctaaggatgaacaaagtcaccttgaggatagaattgctcaagttgaagaaatgcttaagtatgcacaagttgttgatgcagaaagcgttgatcctaacgaagtttcagttggtaaaacaattacctatactgaagttggtactgatgatccagaaacttacactattgtaggtagtgatgaatcagatccattgaatggcaagatttctaacgattcaccaattgctcaagctttattgggcaaaaagaagggtgaaaccgtatcaattaccactcctggtggcaagtttgacgttgtaattaacgaagttaaagcctaataataaaaagggagggtagctatgactatcttcctttttgtttttttgaaaggattttaaaatgagaacagttggtattattggcatgggccatgttggtgcaaccgttgcctatactttatttacgcacagtatggttgacgaactgattttaattgataaaaatgaagctaaagtaaatgctgaatacaatgacttgcatgatactttggctagaaatgatagctatgttaatgtgcgaaagcaagattgggacggcttagaagatgctgacattattattaccgcttttggtgatattgcggcttcagttaagacaggcgaccgctttggtgagtttgaattaaatgcaagaaatgccaaagaagttggtgcagatattaaagaatcaggctttcacggcgttttgatcaatatttctaatccatgtgatgcaattacccaaattttgcaagaaacttctggtttaacgaagaatcgcgtctttggtactggtactttccttgatactgcaagagttcaaagaataattggtgaaaaacttggtcaagatccacgtaacgtagaaggtttcgttttaggtgaacatggttcttcacaatttacagcctggtcaacggtaagagttaataacaagattgctttccaattgtttggtgatgaagaacaagaaaagattagtgaacaatcaaataagaattcctttattgtggctaagggaaagggctatactagctatgctattgccacttgtgctactcgtttagttcaagcagtctttagcgatgctcatctatattgtcctgtttcagtttataatcctgaatacaagacttatattggttatccagctattattggtcgcgacggcattgaggaagaaattgaattaaagcttacttctgaagaaaaagaaaagttgcaagctgctgcagataagatcaaagaacacttgaagcaattgaagaaataagtaatattcattataaaaaataagacaggaattacatctgctgcaattcttgtcttatttttgtctactttagctttacgtcccaagctgcaatttgcttattgccatagtagcgtttataaatttttttagtcttcttagtttgatacgccttaacaacttcttgataaattttcttatttttgtcttttgtccgggcacaaatgatattgatccattgttcagaatccttatttaaaggttctacaaaaatagtctgcttatcacctaaatgagcgggaccagcaaagtcattgttaacaaccgctgcatcaacgtcatcaatgacacggctagtttgttctgatgcaacttctttaatcttgaaatggtcaggattagaggtaatatctgctactgatacaagtactttgcctttcttcaatttgattaaacctgcattttttaaaacaaacagagctcttgattcattagtaggatcgctaggaactacgatagttgctccatcgggtaatgcattaaggctatgatatttcttagaatataggcgaataggagcaatgtaggtcttaccaattgcagtgattccaccatgatttgctttattccaagcattaagaaaagcatagtgttgaaaggcattcagatcaacatcaccagatttgagggctttatcaggttgatcataaccgtcaaaacttttagtggttaaaataatgccatatttttctttaacggttttggcaacgctcttccagatagcaatatcgcctttgctggcaccaacaattccgacactaactttagtttgactactgcttttgggtgtccaaaagaaactaaaatagccagctacaataattaataagccaatgacggtgctaataataatgtgacgtcttcttctttttctcatttttatccctgccttttgaaaaaataaaaaacacccatcctgaaaaggacgagtgcttcgtgttaccacctttaattcgccaattatttgcataaccagccttcacaactatctaacaatagcttgcattgctaacgagtgcaaccccgatgctagctaaatgtcactagcataatcattctgaatccatcttcattgaatcattctttttgcttttcaccaaccagcaattctctgttaaagatttggttcaattactctattcatcaagatttttaattattgttaataatttatcatttaattttaattgtgttaaataaatttttttacttagttaaaaagttagtaacggaagaaatagtgagaaaaagtttatttttgtcgattaacaaagtagtaaatgagtgagacaaccgattcagccaacatcccaccggccatccagtacattgccatcatcattttgccggtaaaagtaaagtaggcagtaatggcgtaaacaattacccaaataattttccaaaataagttattcattcctgagcacattttgaagctcctttatttttgactagcaccagaactgctgtcaacttccatgccgcaaccttcggtatccattcctggcatccacacatcttcaggtttaatgcctctttctttagcaaaggcgtcggttaatgtcttcatatccattaacttgtatgtctttgggtgtttagggtcgaatacttcgatttgagccatcattccggcatcttcgtgttcaataatgtggcagtggtacatgaagactccagtttgtgggaattctacacgcaagcggacggtttcacctggtctgacaggaatggtgtctttgtaaccatattcatttggaaatggcttttcgccatcacgtgaaacgactgtaaagtgtgtgccgtgaatatggaatgggtgcaacataccgtgttccttagagttggtattagttacgtcccagtattcagcatgactaacttgttgcttcatatcgatccgctgcattgcgaattgcttgccgtttatcttgttgtgatcatccatagttactttacgaactggcaaatcttcagcgatttcaggaatttctggtttgaataatgtatcaggaataacactgttgtcaggtgcaaacttgtgaattctaaattcaattagtttgaaatcatcagtataaaggttaacgacatcgccatcatggtaatccttgaagtcaactacaacttgaagccgttcaccaggtgttaccaagatcttagtcattttgattggatgaggcaaaaatgaatcgtcacctgcaatttgagtcataactaggtcatcatcaaagtgcaagcgccattcacgacggttagacccacctaagaatagtaaacgaatcttttgtgttgttacatcaacataagggcgaaccgtgccgttgattaatggtgtttcaccgaagacgcccattgcatcataatcagcgcgatagtcaagttgattatctttgtggaaagtacggtcttgcaaaataactggaaactcgtcaacgccatagtttttaggaattgggagtttagcttcgttttcatctgttactactacgcccatagctaatcccatccaaacttgggcagcggtggatggacatgggtgagcatgaagccatgttaaggcagctggttgattaacagtgaattcgatttgcttttcttcacctggataaacaggggcatgacagccaccatcagtaataggaccaggaacttccatgccatgccagtgataagttgttagttctggtaaactgttttttaaggtaacgtgaactcgctggccacgttttaagaccatggttttacctaacaaaggagcgttataaccccaagtcttggtcttagctccaggcaatatttggcttttgctttcaattgattcaagagtgaaccagacatcagtatcagtttccttatccggtgcaaggactggagggacagctaatggctgagcttctacaccttgagggatgcttaatttcttgtagtggaagtggtttttgtcaaaatcttcatcttcgataaagtaattagtgtatatcttatctgtcatcttattaacaccatccttttgacactaacttagcatgattttttaccgttttcaaggcgcaagaacgctgttatttaaaggcttgcatgtctattataactatgtaatgaaaaatatttttactattttgtaatcgcttacacttaggtgaattatgttattttacaagatttgttgccttgctaggcttgcgtgtctccggtaaactaagcatgaagaggtgactagatgtataaaattattgcgtgtgacttagatgaaacgttgttgagcgcagatacgcatgtctcagtagaaaatagagaagcgattcaaaaagcagttgctcacggtgtaaaatttgttcctgcaactggacgaggctacgtttctgtccaaaatactttaaaggaaataggattagagcaggcagctaatgaatatgtgatttcattcaatggtgccagcattacagaaaataagaataatcgcgtgctgtattttgacggcttgcctaatgaaattgcggatcggttatatcggcatggggttgaactagatattgccatgcatgtttacactcaagatatggtatatacgtatcatatcgatgatgatgaacgtgcctatatgacgggacgacaccagtttaaagagattgaagataaagacttgtcatttttggaggggcagaaaattgccaaggtgctctatgagagtcttgataataattatttgcaccggatcgccgctgaattaggaccaattacgcaagaattggatatttcatattcatctaatcgttatttagaatttaaccgtaaaggtgtcaataaaggcgcgggactgatgaagctggctgagcagcttagggtgccgattgaaaaaacaattgccattggtgataattttaatgacttgtcaatgattcaggctgctggtgtgggtgttggtgtggctaatgtcaatcctgctatgaaagagcaatgcgattacattactcaggctgataataatcatggtgcagttgccgaggcaattgatcattttatttttaacaattgaaaaaaataaaaaaataattgacagattaaaaatacatgatattattgtttacaacaaataaaaaaatgagctttgataaggaaagtaacttaagaaatgatttgcagagagtcttcggttggtggaagaagataatgatgaattaagtgaaaatcacctttgagctgaaagtgcgatattagcattttcagggtccgccctctatagcggcgacgtatcgctgattttgatagaatcagccgcacgtgcatgaggtagaatttttgtgagtattattctacgaataaataggtggtaccgcgttgaagacgccctattagatcaattgatctagtagggcgtttttttattatcataagcttgttgttaattttttgacttatgggagagataaaaatgagaaaaacattgaagcacttatttggcacgactgtagtagcacttttaggcgtaagtactttatctgcatgttcatcaagccaatctggtgctaaagcacctaaacaagaattgacctggatgactacctcagaaatccaaactatggatccttcaaagatggtagatacaactggtagtgaacaggcatctaatgtttttgaagggctcaatagactgaataaagcgggtaaagttgtatctggtgtggctactaaaactaatcagagtaaagatggtttgacctggacttttactttaagaaagaatgctaagtggtctaatggtgatccagtgaccgctgaagattttgtttattctttaagacggacacttgatcctaagacacaatcacaacagcaaaatgagtggtcaaatgtagttaatgcagatgatgttttagctgggaaaaaagctccgtcgactttaggtgttgaagctaagggtaaatatgaattggtagttcacttgaaacatcccgtaccgtattttaaagccttgtcagttggttggaatccgcaaaataaacacgtagtcgaaaagtttggcaaaaaatacgggactgcatctaagtatatggtttacaatggtccgtttgttcaaaaaggctggactggttcaagtcttaactggaagttagaaaagaatgatcaatattgggacaaagataaagttaaattgcagacggttaattatagtgtacaaaagacgccttcaactgattacaatctgtatcaggctaacaaattagatggtgcctatcttgatgttcaggcttcaaagagactgaagggtcaatctggttatacagtctataaactagatagaactgaatacttgactttcaatgtatccaagcatccagaactagctaatgtcgattttagaagagcagtttcaatggcacttaaccgagctcaattggctaaaacagttggtggtgctaataccgtagctcgaacttttgctggaccaaatgaatatgttgatggtaagaattttgaccagtatgttgaaagcaaaaatccagctaataagtatatgaattataaccctacaggcgctaagaaactttatgatagagcattaaaagaattgggtaagaataagttggcctttaccttaatgggtgacgatgatgacgtttctaaaaaggttttagagtttgtgcaaagtcaattagaagatacctttggcaaaaaagttgatgtaactgttagaagcatgccgaagactactagagttaagaaaatgctcaatggtgatttcgaggcagtctttactggattgacttcgggctatttagatcctaattcacaattgcacacaatgatgacaggacaaagttataacttcggtaaatggtctaacaaagattttgacaagtatatgaataattcagataaggaattaaatcctactaagcgattagaagatttgtataatgcagaacgtgttttaactgatcaacaaggattgacgccattattccatgatggtcaagcttggatggttcgaccaagtgttaaaaatgtagaattcttgggtggtaatttcagctttaaggatgcatctgtaagtaatgattaggagaaaaaataatgactaagacagcttttttaaattgtaatttattcgttggtaatgaagataatctagtagataatgcttggtttgtcgttgatgatgaaacaggtaaattgaccgatcaaggtaagggaaaatgcacagcagattttgacaaacaagttgaccttaaagggaaatatgtgatgagcggtttgcttaattcacatactcacatggggcttgattctgacttgaagaaaaaatttccgactactgaagcttctactacttatgcagcactgcgggatctgcgtgaagctttacaaactggtgtgacttatgttcgtagttgtggcacatcctttgatgttgactgtaaattagtgcagatgcgcaagcagtatccttttgaaggtcctcaagtgatgccaactggaatggcaatgtcaattgtcggcggacatggtgatttcaaggtggggttaaatggagagcaaaatgctagtcatttggttaacggtccagaggacatgcgtcgggcagtgcgtgaacagtttgccaagggtgctaaaaatgttaagctgatggcaactggtggaattatgtcattaggtgatgaagttgatgatactgaactttctcttgaagaaatgaagatggcagtagaagaagctcattctaagcatatgacggtttgtgcccatgctgaggggagacgcggtattcattatgcggttgttgctggtgtcgactcagttgaacatggtttttatctggatgaagatgatttagccttaatgaaaaagcaaggtacttttttatcaccaacattgactgcaggtcggacaatcgtcgttcatggaaaagatgttgtacctgagttctcataccgcaagatgtgtgcagtagttgatgacttttataatcatgttggacatgcaattaaggaaggggtgaaattggcaatgggtaccgatgcaggaacatacttcaatcgcttttctgatacaccaaatgagttggtggaattagttagagcaggagccacaaattatcaagctttaagagcaggcggcttgggtagtgctgaattgcttaaggttgatcaagaatatggttcacttgaagtgggaaaatatgcggatttcttagttttacgagagaatccattagaaaatgttgctgcagttggtcaaaaagataaacaagtttaccaacatggtttacgtaaattctaaatattttttaccacaaataaggcatcctcgtgagatttttcttgcggggatgcttgtttgtgtagttcaaattaaagtaaacattttactaaattctccagtaaaagcgaataaacataacccaaaatgtaaaaatagttcttgatttagtatgaattacgatgtagtatttaaaccatcaaacgtattactgatgatttgaataagtggagattgaaatgtcaagttttcaagaatactactcagaattacaggaactagcagggtatttactacacaatccagaattaggctataaggagtataaaacttctaaggcagtggaagcagaaattgctaagatttctactaatataaaaatcgaacattattgtaaaacaggacttaaggtaatgtttgataatcattgcccaaaaactattgggattattgcagaattggattcactttatcagccaggtcataaggatgctgaccctgaaacaggagcggcgcaagcttgtggtcactatactcaggtgacaacagccttggctttgataaatgaactgatgaaaaatgatcgtctcaacgagtttggcactaatttggcttttatttttactccagccgaagaatttgtagatcttaattggcgcaaaaagcataagttagctggtgattttacttactttggaggtaagcaggaagccatcaaacttggcgtatttgacgatattgattattgtgtatcagttcatgctataggtgaagattttgagcgtaggactattgaaattaattgtgatttagctggatttaattttcaatactttgacttctttggtaaggcgagtcatgcagcatttgctcctgaagagggggtaaatgcacagagtatagccaccctatttaccactgctttggccttcaaacgtcaacaattaaaaaatccaaatcaaattaggtttaatccagtgatgataggtgataatacagaatcgattaatgtaattcccgatcatgttagcatggggacagatatacgatactttgatgtcgaatatgcacagcaactaatgaagcaattcaatcaagcagcagaaggatgctccctagctttaggcggtaattttaagtcagaaacacaggttggctatttgcctttaaggtcgaatagagacatgaatgctttagtaaaaaatgtatttttaaggaatgacaagatttcagaattgattgaaaaccgaggctataccatggcagctggtgatattggtgatgtaagttatctaatgccaactattcagattggatatggtggttggaatggaaccattcatggctctgattttaaattagttgatccagtttttgtactggacatattcccggaatttatctttaacagtgttttagaaatatcaaataatcttaataaaatcaggacttatcgtagaacaaatcaggaatatcttgaacaattaaataaaatgggagcagaaaaatgaaatctttaaaaaattatggtccattaattattttagtgctattgattgacactattgcggaatttatagggatgcaggttttcaaaattggtaaaattgaagtttcaattctaccattagtattcgcagttattttagcgattattatttatttacttccattaaagccgattaagcaactctacaatgataaaagagtaaagtttgctggaaaatatatgattttaataatgttgccactaatggcacgttatggagcaaatgttgcacctaagattaatgaaattttatcagtaggttgggtatttctcattcatgagttaggtaatttaggtacaattttatttggactaccagtagctttattactaggattaagacaagaggccattggctcaacattgggattaggcagagaaggagaactagcctatattagtgaaaaatatacacttgattcaccggaaggtcgaggagtcctaggtatttacttaattggaacaatttttggttcgattgtcttctcaattttagcaccagttcttttggggatgggctttagttatcaagctgttgcgatgagttctggagtaggatcaagttctatgatgactgcagcttcttcagctttagcagctctggttcctaaacatagtgagacgattctatcatttgcggcagcaagtcagttgttaactagttttattggaacttatattatgtatttcctcgcagttcctttgcaaagattcatgtatgttcacttgactagtttgcttgataaaaagaaagaagtatacccagaacatgattagagaaaataatttttataaattaggtagagatgcattaattttattgcttagtgttagtttagttttatttgttcagtagattaagttagtaaaaaatcctaagagcaccccaattacacctgctacttttgccggcctaggtctattatggctgttttctctgattggcattattatcagtatgttaatgaaacgagttccgtggaagattgttagaggatttcccattctaggctgggtgtctatcgtttcattagttttctgtttgcttagtccatattgtgttcgtgtaattaatgcagtagattttttatcattaactacatcggtattagcctttgccggaatttcagtaactcatagattgaaggatttatcaaagatttcatggaagatcttaattgtggcattatttgtctttttcggtatgtatttcatggatactttgatttctcaaatagctcttaatttgagtggaaaatagaaaaaatatataaagccacgctcaacagcgtggctttttgaagtgtgtcgggcatgacattcatctagtccaatgaaagcttggcgtaccgcaaggtggaccgctctcgccaatcctatccaatatctatttagataaaatggacaaggaattggaacaaagaggcttgcgctttgttcgctatgtcgatgactgcaatatcttcgtcaagagtggtaagtcggctaagcgcgtgatgaagtcaattacatcatggctagaaagaaaactgttcttaaaagttaacactactaaaactaaagtagttagaccaacgaagagcaatttcctaggctttaccttctggaaaacgggcgaaaactggcaagcaaagccgggagacgaccgtaaagccaagctttatgacaagattagagaattgttgagtcgccataaagcagttgctcaacctctatcattagtctttactaagataaatcaagtggtcaaaggctggggtgcaggcgtttttggctttaacgcaaaagaagtcgcaaaaatgtggcaggaggcctttgatactccgacaagcatctccactgtgatttacgctgttattcctggcagaaagaataaagacgtggtagctgattttaaggatatttttgcttaaatagaaattttctctcaaataacaatccaaacaaaaaagacgagccaatgcccgtctttttattttcttgaaataaatttttagttaaaagttagcttttttaacgtaagtgttcttagaaatacgatagaaagtcttgccgtgtaatttaattgcgcgaccataagtgttaacgcggtgacctttcttcaaaactttcttattagcacgcttgccgttcttcttgtagacataagcattgtgcttcagagtccgcttaacggccttagctttcttggcagctgtctttttagcagcagcggcatcagtttgagtcttgtcagatgtagtattggcatctttattagcagtgtcttcagcgaccttacctaaagtaatatcagccttttcgttcatggtcttgcccataacgttaagaccgaattctaagctgccagcgccttctttataagcatctgctgagaaaacatagtcaagggatgagccgtctttagcaacattttcttgcttgccggctacaccattcaatgttaggctagcaaccatcttagacatgtcttgacctttggtcattggtgctttagagccatcaacgtgaataattacttcggtaactttaccgtctttaacattaacttgagcagagttgcccaagaacatagcagcttctgatggggtagtgctgccagttttggtaatagtcatagtgatagtttgcaagtcgctgttttgactagtagcagtagttgcagcaacattagtagcaggttgatcagctgcagacactacagctgatggtgccaaaacactagcgcttgcgagtaaagcaagtgatgttaaaatgattttagtattttttctcataaaagtttcctcccacgaattttagatatcgcttacattataatcaaataaatgttataaatcaatatattttttgttattttatttttttatgagcataataaactgaataaaatatgaaactgtcaaatcttttgtgtaaatagatctttctcgtaaattgattttttaattatttatttaatcaaagtaggattctaaggtgtcctgaacctgaccaaagcctttgtggattcgattgaaatagcgttcgttgtagctcattgcctgaatgccaataaaagcatcaagcgactgttcagttggaaactctgccttaggcttagctttgcgcttgatcacattgttaaatgattcaatcatgttagtcgaataaattgaagctctgatctgcttgggatagttataaaagaccagcagatctggttctatgtctttcaagcttctgataacatggctgtaaaccttgccccatttggtatagaagtcatgcaggacagctgtggcttcttctttgtttgtctgttgatgcacctgtttgaattcgttcatgatcttttcacgatcgtcgacgcgtactttagcgcagatattgcgcatgacatgaaccaaacagcgttgaaaatgagctttaggataagtcctggccaaggctgttttcatgccaacaacaccatcagaaagaaaaagctcaacttgctttaagcctcgggatttcatgttttgaagcatatctgtccagacttcaatgttctcgctaggtgcaatgcagtagtcaatgacctccttgtgcccattaggcttgatgccaatggcaatatagactgcttcacgctcaaatgtttctcggcgcaaaggaaggtatgtcgcatccaaatagacgcagaaaaacttgtcgcttagcttgcgtttgtggtaagcctcaacctttggaatcatctgcttggaaatatttgatacctgagctggactgtaatggctgccatacatcttttcaattagatcggctatttccctggtggtcacgcccttggagtaaagcttgataatcatgctttccaagatatccgagtgctgcttgtagtcaggcagcgtgtgctgatgaaattgaccgttgcgatcccgaggcacttgcacttcaattgggccaaattgcgtatcaactttgcggaaataagcaccatttctagagttgccagtattccagccatttctggcatagggatcatagcccagaaaggcagtcaattcagcttctagcaagttattaacagcctgttgtagctctttgcgcaataaatcatttattttgtctggattgaatagagcttgagcaaaatctttggtaaaatcattcatgaaggagttcttctttctgtatgtgtttttttgttcaaaccaatcatacgagaaaggaactcctttttctaatgtttaaagaaataaatttaaggaatcattcatccttacacaaactattttacagtctctaaaatatcatcttgaaaccgattgcatagttattttaagaaatttataatagaaaagactaatagtattaatagtaaaaagaaggatattagaatgaataaaaagttacttaagttaatcgcaagtagttcggtcgcaatgactttaatggcacctggagtggcatttatgcaaactaatccggttgtaatggccgctgaacaaagtcaaaagacagtgggaatgacggtttacaaatacagtaaaaatcaccgcagccatgctaagtcaatggctcaaggttttgtgggagataaggtgcaattaacagttagtcaaaagcatgtgactaagatgacaatccatgtcgatggtaaaaatagtccaatgggcaaggggcaaaacgtaaataagattgtaaaatccctcaagattaatggcgttagcggtaaaaaggaaaatgtttccgccgacaaatctagttttgactttgtttttgcaggaaaagctttcaaaaataatggttgggtcaagatgcaagtcactattgactttggtggtaagatgaccgaacaagcttgggtgaagtatgacaaggttagcggtttaactactagcaagaaaaagaccgacaagaagcaaaagaaggctagtaaaaagagcgtcaaaaaagttagtaagaaaagtacacacggtcagcgcagataaaaaggttcaaaatatcaattatgcggtctataaggcggatcgcagtggcgtttctgcagcaaataatttttacactcatcatgccaggattgaaaaagtaaagcagggctatgttatgaccttaaaagttgaggtaaagcatgggatggtgaccaaatttcagccggtttcactgggaattggttcaatttcaaacctgcgttttaccaaacaagctggcaaggatatctggacttatcaggtacacttcaagtcgctaaatcagttgaagaagcaggctcaggggagtctgcgcttgagcgtaccaattgccaatattcatgatcgtttgtttaaggtctggtttgcttttggtgtaaaaaatgtggcgcacagttcgactgtaagcaaggcattaaccgaagcaaatagtagcactgattcaagtagtactagtgatgctattactgcagctaatgacgacagtagtaaagatgcaaaaaatgctacaagtagcgctcaaccgcagtcaaagccagttaaaaagcagcagtcttcttcaaactctagtgtaaaacctggggcaaagatgacacccaagaagaaaaagatggcgacgattgcagcggtggaatatccatttttgcctgtgatcgcaggctttttagcatttgatgctgcaattattggtttggccttttacttaagaaataaaattttgaagagaaagaaataatgaaaaatatagctaaaattatctcttttcctttcttgttgctaacttgtttgtttatttttggtgtgactgttagtgcacaaagcgtgagttatcgcacttacaagtatggcacgcatcagacctcgatggctgatggctactatgcgcgtcctgctcaggttgtggtagacgacaatcagtacctggtaacgatgacgattcgcactaagaaagatctaagtccctatccggttcaggtgttaacgattgatggacaagcaccgctaaacgtagtaaaaacgcggcatggcagtgactatgattatcgctatagttttcgcactaataatttaaaacgtgatatttctagtcaaattaaaatagatgtgccacatgtttaccaagcaacacacaatattacttttgcttttgacactacacagttgcctaagttaacaaataaaaaagagcgagcaagtcatgcggaaagtgcgataaaacgcagcgcgccacaggtgaaaaacaagagtgttaagcctaaggagcaattggcacaaaagaagcaagcggcaatagctaacaggcaaatagcgcagaatgcacgcaatcaacgtgctaatcaacaaaggcagcgaaatttttattatgttattttggctggagtgcttagttcgttaattttaattggcgttgctgttttgattgtcgtaaatgccaaggaaagaaaaagtaaatgaaaaaacgtaaaggattaattattggtttaattatatttttagtagcaatcgtcggagtggcaattggtgctaaacgattgattgatcaaaaagttgccaataatgaaaagattgttgccacaagtgcagcgattactgaaatttttgataaattgaacgttaatttagcaggggttccaaagacgcaggctaagttaccagcacgctatcaaaaggtgcccaagattgggagtccaatgaagccaagtgttgaaaagattgcttctttgaatcccactcgtgtctatgcagtctcaactttaaaagatcagtatgatcaatcatttaaagaacaaggcgttaaagttacatatttgaagctggattcagtagctgaccttgaagctacactgagttcattaggcaagcagtattaccggcagagacaggctgattatcagattggcttaatcaaaaaagccgttaaaaaggctaaagcacgtgttcacggtcgtaagcctagagtattgatcttgatgggcttgcctggcgctaattacatgattctaactaatcgatcatatttaggtgatttggtcagaatagctggtggggaaaatatctatcactctgatagtcagatttatttgtcaccaagtaatgactcgctagctactaaaaatccagatgtcattttgcgattagaacatgctttaccaaatgtaactttgccacaatttaagcaagagtttaagaaaaattctgtttggaagacgatgaaagccgtaaagacaggcagagtttatgacctacagcaaccagactttaatgcttcagctaacatgaatgtttctcaagcattgaataaattaagcaactggttgtaccctggaaagtgatcaaaatgaagaaaaaggtaatttggataaacttgattttagcagttctgttaatcagtacgattttctttgcattaactcacggagcaagcaatttttcaatgcaaaagatgactaacagccaattgaatattttgtttaatatccgtgtcccgcggattatttcggcactagtagcaggagctagcctctctgttagtggtgccttttttcaggcaactttgcgcaatccgattgcagaacctggaattatggggatctctagtgcagccagtttatgtcaattgctagcggttattattttgccagaaattttctttggtaaaattattttcgcgattattggcggactgctagcgtttgggcttcttttattattccaaaaaaagatgacgccttatcagttaattatcatcggagtggcattgaatgcagtgttcacggggatgcaggaagttttcactaatagtcaaaatagtggcagcagcctggccacaagtagttggggatcgacgatgtatttattgattattggcgtagtagggctgattttcgcgatttgttttatgaattgggctaattacttgaaggtcaatgatgaagagctgacgtctttaggtgtttctgctaaaaccctgcgtttagtcttgatgctaattgcagtggttttggccgcaacaacaacggcttgcattggtgttttagcttttatcggaattattgtgccacaggttgctcgtttgcttttgggatatgattatcaaaaaatcattccattttcgatttttgctggagcttggtttttattgttcgttgacaccatcggccgggtgattacagcaccgaatgagattgcggctaatattattttggctattgttggtggtccagttatgattttaattttatggaagaggcagaaaaatgcttaaagcgtcgcagattgatttttcatatgggtcaaaacaattatttaatcaattctctctgagcctgcaggagcaccagattacgactttaattggtcctaatggatctggcaagtcaaccttgtttcgcttgcttacacgggcaataaggccgtctgcggggacaattacgctagatgggcaagatatctggcagctagctgcgaaggattttgccaaaaaggtagcaattgtccaccagcagaatcaattgtatgatcagataactgtcaaggaactggttaaaatggggcgtctgccgtatcattccttgatgggggatgaagaaaatggatctgctcgccttcaacagattatgcaggagctagagattgctgatttggcagataagtttatagcgcaattatctggcggtcagcagcagcgtgtgtggcttgctacagcactggcgcaagagccggaatatctttttctagatgaaccaacaacatacttggatttgcattttcagtatcgctttttggatttagtgaaaaaattgaatcgaaagcagaatttgacgatttgcatgattttgcacgatttgaatcaggctttgcaatatagtaatcaggtaattttgctcaaccaaggcaggattcaaaagcagggcaggccagaagaggtaattacggcgcagacgattaggcaaaactttggcatagattgcgagatgatcgaaactgagcagggaaaagtcttgttaatggcaggttctgaggcaaaataaaagaccacgagaaaactcgcggtcttttttgtaataataaattattacttgttaacttcatccttgaagctcttacctggcttgaatgctggaacgtttgatgcagcaatttcaatttccttaccagtttgtgggttacgacccttacgagcagcacggtgacgaagttcgaaggcaccgaagccaactaattgtaccttgttgccttcagcaacattgctcttaacaacgtcgatgtaagcgtccaaaatagtgttaatgtctgtcttagtagcatcagtctttgcagcgatttgatctactaattgtttcttagaaatagtttccatgaaaaatacctcttttaatataaactacgattacttattttaacagtaatccgcgtatttacaaggggaaacagcctctttaaagaatttttttaaaaaggaaagaaattctatgtatttgaagcgaaaaatattgtattcgctatcaaaaatgtagttcatgtaatgattcttttgttttgatttgaaaaattaacttttttcaaaaaatttagacattttttgcgtaataaatgatgggagacaagcctaaattttgaattccaaattttgtacagtgatggaatatataagagaggtgaataatctttaattacacaaaccacatcctcgaaatatgcttaaacaatatcaattaagaacgttgaagaatggattaagaatggcaggtataagactatgagcctactaacttataaaggttaccaaggtacttatcgaagttgaaaatgatactttatttggcgaagtcttaggtctagaaaatacttttatttcttatgaaggaaattctctggcagagttgaagaaagatttcaaagcgggtattgatgattatcttgagaattgtcaattgaatcatgagcaaccagaacaggctaaccaagatgcagctaagttacagttgcaaaaattattattaacatcattagcgtgattggaacaaaataaagctcgaaacttctacaaattgtagtaacttcgagctctgcattaatctgtttttgttcaatacaacgcatgctattacatattggcaaatcgatctagttcatcatgtgttcctaatgcaaccaaaactaggattagttcatgtgtttctttatcaatccggtagtacaatagccaatcgtcattatattgacgattaacgtgcattttgcgattttttcctacagggtgatctttatgtttggctagaaattctttgtcattggttaatattgcttcaacacaatcatcaacataatccattggataatgttttctttcatatctcttgtaagcgcggtagtagcgcttggtaggattaacttgcatgattatttccgcatggcctttttgtattcttcaaaagagctataacttccatgataaatgtgattatcagcttcatagttcgcttcatctagttctgtcatgggtcttagttctaaaggaatgccattacttctaacaatagctttgaaatacattctaattcctgttgatatgtcaaccccatatgaagcaagaatatcttgagcttctttttttaatttatcatcgatttttacactaatttgagccatagtacaacctctattcacaaaacgtattactttatctatatagtactatatactataaatacaaaatatcaatttttagcgtttgcttttaaaagaattttaaaagattataggtagtcttattatgaatactaggggaaaaaactaaaagtgacatttatatctttaatcgtaatacaccagcagaaatttaaacataaacaaagctcgaagcttctacaaattgtagtaacttcgagctttttgtaactattcagaaaagataatttagcggtcttcgtggttagtgaagtaacggtagtccttactcttgtcgaacaatacggcacgagcgttttcaccgttggagattgagaagatagcgtcagggtacttgttcttaacttcatcttctaccaatcctctaagcatttcgttgttagctaaaactgaaccggttaaagcaatcttcattggcttaggatcttcgtaacggtcaagaccgatgatgatgtcacgggctaacagatgagcttgtttcttaataactttgattgcatcatcgctgccttcatcagcaagttgtgcaacgtgaacagccattcctgcaacttctgggttagacatcttgtagaatttagcgttacattcatccatgtgttcaacgccaaataatttagtaaacatttgaatcaaagcgttgtcttcacgcttgtcccagctaagaagagcagattgcattgctgaacgagcaattgcgtaacctgagccttcatcacctaagatgttgccgtagccaccaactgcgattaagtggccgttttgtaaaccgttgtaaactgagccagtaccggcaattactaaggcaccgtcatcaccttcaagaccagcgtaaagtgctaaaagtgaatcagtaatagcacgagtaggtaagttgttaattcttgatgaaatagttgcggcaacttctggagcattaccgacaactgaaagaccggcaataccaacaagaacgcgcatgcagtcaccatcaaccttgtcgatcaattcgttgatagtgtcagagatattcttaattccgccttcgtagtcagcgttaatttggcctgggccgccttctgcacgaccgatttccttgccagtttcgtcatatgcgattgcagttgagtgggtaccacctgcatcaacaccaatttggtatttaagagccatgttgtaaatcttctttctatattaatttatccgaatgataacgtatacattgtattatatttttatacagtaggtctagtaaaagttttgctgttagcgctaacagtggcttttttcttgcaaattaataaaattgttaaactaattaagctaaccaacatccccagtagaagaacccatggtacataaattaatgtaatttgatgttttcctggattcaacttgaagtttaaaaaagcattcatgaacaaggttttattcttgttaattattttgccattatctaaaactaaccagttaatgttattaggaatagttgacgccaatgtcatcatcttcttcgttgtgaaatgattagatttgatgatcaaagcaggtgtttgtttaaagtttggttgtttttgcttaaaacgatgtataatctgctcgagcttttgtgtgtttaagcgccagaagtgaatgccactaaggtctagtttatctttttttagttcaaaagtaacttgcaaccgttgaccacgctggtggctacctagattaatgagacgggcattttgatcacgtactgccagattaatattagcaccattaactgtcattgaaatggcattatcatcgatctcaccgggcatttcaatgtagtaagaatcatcagtctgtggtttgaaattgaaaatgatgcgtgcgatttgcttattgtttttacgattatattgtagttgatcgtttttcatactagttacattaattaattttgctttaggccaattgatctgcttaaacagctgcacttttgcccctgtaactgcttgaaagaatttggtttgattactagtaatatctagagagttaaaattgattttttgcgttttttgtgatgttaaaaagagtaggggcaaagcggcattatttttcactagatatagttgggaaaagcgtttttgcaaatgataatcgctggcatcaacgcggtggttggaattgtcatacttcatttgcttaccagacttgatcgttgtgatttcatcattaggcaaaagataatatttgattccaagtaaatcatctgtcaaagtagttccgccaaaattagtgtaggaattactattgtttagaaatccaagattgttgatcaggttgagtactttttgatcagaaatcgaattaaaattacttaaaccgtaataaccagcgctaaaaggatcatcatcagaacgatagaaagtcttttcagttcggtaaaatccagaatcatgttgatttgcgtattgtactgcttggctgacattagtggtaaagttctgataatcgctatttttttgataagctaaattgcctagagatagtactaggttgacgattaactcaagctcgataactaaataaaaaaatggcgcggcaaaactgtgttgatgataaataaagccaataaacaagattccgagggctagaaaagctcccgtggcaatctgcgcatcttcagttagaaagtcaaaatgtgaggcattaaatactatataaacaattaaacctaaagaaaatagagtcagaagtccggtctgccaataagctatacgttctttttgttctaatgcaataacgcctagatttagcgcaaaaaagatcaacacaaagctgaaacgaccaggataccagacagggaattggcctaaatgccagagtaaaaccagtggtgtccaaaaaagagaagcaattaagaaaatgagtaaaattccgtttgctaatttacgctgccagttaatctttttgcttaaaaaatataaaattgtcagcaacaagaaaggcattgtcagataaatgttgggcatcccttcctgcatttcatgaaagttataggccccttcggctaacttagtcagctgttcaactggagaaaactgccagcccaaattccatgaggcagtagaactagccttgccttgcaacatttcaatcagaacggggaagagcataaaggcatctaaaaatgaaccagcgatactttttcttaaataaatccagttaaggcgtaggcgctcctgcttattgatgaagaaaattttgcttaacagataaagcaaaccaaaggctaatgccataaatccggtataaaaattagtgaaccaaagcaaaaaggtaattaaaattaacttattttttcgttgggccagcaagcggtcgatggcattaatcaataaaggaagcaaaatcacagaatcaagccacatcagattatagtgattgccaataacgtagcctgaaagggcataagccgaactagccgctaaagcgtaaaagtgattagtgattttttgcttccaatagtagtaggaagatagtcccgccgctccaatttttaatgcgataataattaaaattgcttgtggcaaaaaatgttgcggaaataaaaataagagtagattgaaaggactgcagagataataggcatcagttgctagcattgaaccgcctaaaccattagaaaaggaatagattaagcgcaagggatgggagaacaaatttcgcctgaagaaggcaagaaaatcaacatattgttgacctaagtcgacagtgagcactccatttttgctgtagaaaaagtaactcaagaaaatcaaagccggtagcaaaaaactaagccagaaaaaaatatttttacgattaattgcaatgtgtcgtgagttaagaaatttaagcatcattaaaaattatataagctcccttatgaattgtagaattgatgtttactttttgttaaaatacatctagttttaataaaggtgatttacgtgaattattttagaaaaaatagtgggactggctcaaacaagcattcctcaactccaattagaatgcgaatcattctaggggtaattttagtcctctttgccatgttaattgggcaattggcttatttgcaactagtttatggttcacgtttcaaggcagaagtgcaaaaaactgattcaactgttgtttcgcatcaagtgccacgtggtgtcatgtatgacgctaagggacgcgttttagtaggtaataaagcaaccaatgctattacttatactaagagtgcctcgactacaacagcagatatttacaagatatctaatgccttgagtaattatatcaagattagcgatgaaaagccgacaaagcaaatggcagcagattattatttagctaatgaagataataatactaagatatctaatgctttgccgaagtcagccaagattgatgctgatggcaataagaagacttcagctgaaatctatcaagcggaattggcttatgttgaaaaaatgaatcctcaactaaccactcggcaaaaaacagcggctttaatctttaataagatttcaggggcttatactttatccacgatttatatcaagaataaaggcttaaccgatcgtgaaattgcccaagtaggtgagcacttatcagagcttcctggtgtgggtatcggaactgactggcaaagatcttatccaaatggttcatctattcaaagtatcattggttcggtttcaactgaaaaatctggtttaccaagtgatagcttgcagtactacttaagaaatggttactcacgtaacgaccgggtaggtacttcctatcttgaaaaagaatatgagccacttttgaagggaactaagtcgactaaccaggttattactaaatcgaatggtaatatccagcagactaagactgtttataatggtcaagccggtgccagcttaatgttaacgattgacgctaagtatcaaaagcaagtacaggctactttgaaacgggtttacagtacagctgttggtaacggtgcagcaagatactctaatggtgcctatgccgtggcgatgaatcctcagactggtgctttgctagctgtagccgggattaatcgaaacacgaacactggtaaaacgactgataatgctttaggtgtaattaaccaatcctttgttatgggatcagttgttaagggggctactgttggtggtggattaattaataaggttattactcccgaaaacaatactttgcctgatacggcaatttatttgccaggttcaccagttaaaaagtcagtttatccagttggtactttcagttcattggatgctgaaacagcgttggaagtctccagtaatatttacatgatgtacttagcaatgaaatgggttaaggctagttatgtaccgaagagctacattcatatgccaaacgatgcctttgacattttacggcgtaattttgctatgtttggcttaggtcaaaagacaggcgttgacctacctggtgaagtgtcaggaattgaaggtaagtcatttaatgacaagggtaatattctttccggttctgtacttgacctagcttatggtaactatgatgcttatacaccaattcaattagcccaatatgtgtcaactattgctaatggtggtaagagattgcaaccttatattgtgcaatcagttggtaaaactagcaaagatggtaagaagatttacattagctacaataagaagccaaatgtccaacaagtaattccttggacgcttgcggaacttaatgtggttcaaacagggttctatcgtgttgttcacggtacgaatggttggggaactgctcacccattgaagaatgttaagccatcaatttctggtaagaccggtactgcacaaactttctactatgatgctgaacaccctaatagaaagcacaatatcgaattgattaactcaacctttattggctatgctccatcgaaaaatccaaaattagcagtggcggttgttttcccaggattagaccctgatggtgaaggaacatacacattgcaagttgccaaagcaatggtacaagattatttcaaacttcattcaacaaaataaagaataatactggtcaaacagcttgaaaaatgctattctagtacagtcagaataaaagtgtaggtggtgaaaaaaatggcagataacatcattttagaatgcaccgaatgtggcgatagaagttacttatctaagaagaacaagcgtaagcatccggaacgtttatccttaaagaagtattgcccagttgaaagacgcgcaacacttcaccgtgaaactaagtaataaaccaagatagcaggttacgtgcctgctattttttgttttttggacaaaaagatggaaaaatcagaattaagaaaagaacaaatcagtaaattaaaagaatttgccaatactaaagaaaaaagagcagaagatgcgattttattagagaaattaatgtctacagatctaattagaagaagtcagacgattggggtaactgcttctttaccactagaagtagatacttctgaattaattgctcgtttgtgggataaaggaaaagaagtttatctggcaaaggcacgaggcgatcaaaatcatactttagactttttacgctatacgtatatgagcaaattggtaaaatctaaattcggtgtggaagaagtcgccgatgaagatgcgaaaatcaataatgatttggatttagtcattgtgccaggtttagcctttgccttagattcgcatgttcgacttggctttggtggaggttattatgatcgctttttggctaagcatgatcctaaaactgttgctttagccaatagcaagatgacgttcgatactagcatttggcctatcgaaaaaaccgatattccggttcaaacaattgttactcctgataaaatttattaaaatagtcacaatgacgaagataagggggattaaatgaatactcaacgaaaaattaacctctcacaatcatttgtgactttaggaattttagtagttttattaataatctttttagttgaagtgtttttaggtggctcagagaataccaatgtcttgatgaaaatgggagccatgaataattttgccgtggtggctggacaccaatggtggcgcctatttacggcccagtttttgcatattggcatcatgcatttggtttctaatgccattattatttactacatggggcagtatatggagccattaatgggacatgtgcgctttttagtaacttatcttttagctggggtcggtggcaatctaatgagcttggctttcagtgctgatcgcggcttaagtgctggtgcctcaacagccttatttggtttgtttggagccatgactgccattggcttgcgcaatttgcataatccaatgattgcttttttaggtcgacaagcctttgtcttagcattgattaacttagcgcttgatatttttgtgcctggaattgatatctggggtcatattggtggcttaattgccggcttcttattagcgattatcttgggcgatcgtgtaatgaagacctacaatcctaagtggcgcgtattggctgctgcagtgttagtcgtatatgttgtttggacggttagaacaggaatgataattaatttctaatgaaaactctctacgatgtacaacaattattagaaaaatacggaattttggttcatgttggcaaaagaatttgggatattgaattaatggctttagagctcgacaatatcaatcgtgccggtctgattgaccaacatgattatttgattgccaagatgattttgagtcgagaacatcgaattgaagtcaaaaatgaacaaaaaaaggcgcttaaagatccgaaaaatgatagccagtaaattagtttagcggtatcataatagatgtaagtttttatgaaagggcagatttagtttatgtcgagttttttaattgtcttagatttagttttattagtcattattttagtcatggttggtatctgggcttggaataaaattcaagctaaatcaattggtggcgaattgactaatgaagaatttaaagaaggcatgcgtaaggcacaaattattgatctgcgtgaaaaagaaccgtttaaacgcaagcatattgatggcgctcgcaacttgccatataccatgcttaagtatcaatatactgagcttagaagcgacttgccagtttatctttactcagattcaaagaccattactttgagagctgcccgttttttaaagaaaaagggttttgtttctatccattggcttaaagatggctttgaagcttgggatggtcgaactaagaagtcaaaatattaaatgaaaagaagacgcatttggagggggtaactctaatgcgctctttttttgtatcaaaattaagaaaggtgatggggatgaaaaaggtactagcgattgtaggaccaacagctattggtaagacagacttggcgattgatttagctaaaaggttgaacggcgagattatttctggcgattccatgcaggtttaccaagaagtggcagtgggaactgcaaaggcaactgcagaagaacaagcgcaagtgaaacactacttagttgatacgcaatccgtttttgacgagtattcagttaaagattttgtggatcaagcaacaaaagcgattgaagagattagccaaaaaggtaagttaccaattattgcaggcgggacaggtttttatgttaatgctttattgaataagatgcagctaggcgagaaaactccagaagagcgtagcgtttcgcaaaagtgggaaaactacctcaaggaaaaaggcgcagaaaaattgtggcaggtcttgaatgagcaagatcctaaggcggcagaaaaaataccagtagccaatagtcgcagaactatgcgagcattgactgtgattgagcgtacaggcaaaaagttttcagagcaacaaaagcagatcgagccccgttatgattacttgattattggcttgaattctgaccgtcaagagatatatcgcaggattaatttgcgtgttgataagatgatggagcaagggatgctcgatgaagcaaaatttatttatcaaaatcgagcacgagagtatcaggtcttgcaagcaattgcgtataaggaatttttcccttattttgaagggcaagagacgctagagcatcgcattgaagatttaaagacagcttcgcgccgctatgctaaacgtcaattgacttattttagaaataaattaccagtagtttggtttgatccgttagatgatccgggttgcgaacaaaagatattgaagaaagtcaaggaatggaaaaatgaataatttgccagaaaaattacaaaaaattgttaaagaagttgatcaacagatcgcacctaaactggttgagattgaagatcaaattgtctataatacggctaaagttttggcggcttaccaagctaatgatgtcgctgaagccgatttaaatggggctaatggctatggcgacgatgatatgggaagagataagctagataagatctatgctcaagtttttcaaactgaagatgcggtagttcggcctcaatttgtttcaggtactcacaccttgtttgtagctctagcaggtaacttgaaatacggcgatacgctaacttatttaactggacagccttacgatactttgcaaaaagtgattggcttgactgatgataagcgtggtactttagtcgagcgcggcgtgcatttttcatatgtgccgttaaccgatgatgggttagttgattatgacgaggctgaaaaggttcttaaacgtgatcagcctaagatcgttgccattcaacgttcacgtggctactccaccagaaagacctttacagttgatcagattaaggacatgattgcctttgttaaacgggtcagccctaagagtattgtctttattgacaattgttatggcgaattttcggaaaaacatgagccaactgagtatggtgctgacttaatggcaggatcgctgattaagaatgctggtggtggtctagctaagaccggtggttatattgttggtaaaaaggacctggttgaaaatgcaaaacttgcattgactgctccaggctgcaccgatgagggcgccactattggcaatttgcatgacttttatgaaggctttttcttggctcctaatgttaccggtatggctgaaaaggggatgatttttgcggctgctttgtttgccaaaatgggcttgaatgttaccccagcttgggatgagaagcgaagcgatattattgagacaattatttttggtgatcctgataagatggttaaatttgtgcaagaagtacagaaaaactcaccgattgattcctttgtaacgcctgaagctgtgcatatggagggctatgaagataagattattatggctgctggtaatttcgtttccggttcaactattgaattttcagcggatggtccaattagaccaccttatgcggtttatatgcagggcggcttgacttatgcgcatgacaaagtagctattattaacgcggttcgtgatacattttttaacaaaaaataaaatttaaaaataatcactagaccaatttgacttttttaaattggtctgctattgtattaaacagttctaggagataagaataaatcataggaccataccaatttaatattttttgtttttataggtgaattaactatgagtaaacaatatactgcagaagaaattaagcaagaagttgaagacaaggacgttagatttttacgcttggccttcactgatattaacggtactgaaaaggccgttgaagtacctaagagtcaattagataaagttttgactaatgacattcgctttgatggttcttcaattgatggctttgttcgtcttgaagaaagtgacatggttttatatccagacttctcaacttggacagtattgccatggggtgacgaacacggtggtaagattggtcgcttgatttgttcagttcacaccactgatggcaagccatttgctggtgatccaagaaataacttgaagcgtgttcttggtgaaatgaatgaagctggattcgacacttttgatattggttttgaaatggaattccatcttttcaagttagacgaagatggcaattggactactgaagttccagatcatgcttcatactttgacatgacttcagacgatgaaggtgcaagatgccgtcgtgaaatcgttgaaactcttgagggcatgggctttgaagttgaagcagctcaccacgaagtaggtgatggtcaacaagaaatcgactttagattcgatgatgctttgactactgctgacagatgccaaacctttaagatggtaacgcgtgcaattgctagaaagcacggtttgtttgcaagctttatggctaagcctgttcaaggtcaagctggtaacgggatgcacaacaacatgtcattatttaagaatggcaagaacgtcttttatgacaaggatggcgaattccacctttcaaatactgctctttacttcttgaatggtattttggaacatgctcgtgccattactgcaattggtaacccaaccgttaactcatacaagcgtttaattccaggttttgaagctccagtttacattgcttgggctgctaagaaccgttcaccacttgtacgtattccaagtgctggtgaaatcaatactcgtttggaaatgcgttcagctgatccgactgctaacccatacttgttacttgctgcatgtttaactgctggtttgaatggtattaaagaacaaaagatgccaatgaagccagttgaagaaaacatctttgaaatgactgaagaagaaagagcagaacatggtattaagccattaccaactactcttcacaacgcaattaaggccttcaagaaagatgatttaattaagagctcattaggtgatcacttaatgcacagcttcattgaatcaaaggaattagaatggtctaagtactcacaatcagtttcagattgggaacgtcaacgttacatgaactggtaaaaataaataagtaattggaaaatctcgtggtgattgaggccacgagatttttttgtaaagtatagatttttcaaaagcatatctaatcgtaattagtctaattacgattagataagtgaacttatggataagtttttaaatctagtaggataaacttttaccaaaaatcaaaaaatattctcttcaaagaagagcaaactgctatataattgtaataatgactggactggtatccctaattagtttagggatacttttgtgttaatgagaatgtattggagtcgatggaatgagaaataagacattagtagcattttgtttgatagctgcaatgatcaatttaactgcttgccaatcgcaaaagcagactaataatcgccaaactattgaaaaatctggtgtgactcagaaacagactcccaaaagattaattgttaagagtatgtcagatactgaaaaatctagtgcaatctcaatttatggatcgatgaaatatggggatgcatggaagactgcatatagtgatgccaagaaaaatcatttgagcattagtgtaaaaaatcgaactggttttaattggataaaaaaaggtagaggttacatttatgaagtaactggcaatggtcaagaaaataatgctttttatacaatgaaaagtgaaaccgtatatttttataatcagaagaaaaatttaggtgtagcaagtttatctgaaatagcttcatatttaagtgaacataatcaagtaaaatctgtagaaaaattagcaactaagactactttggctgctgaagttacatctgacaaatatggggttaagggtgacgatggcctagcattagttccaacgagactttggggtacttggtacaactataaaggaaagaagttagtaattactgatcatactgttaatggtgaagaaattcatcatatttctaattctggtgtagcagcagaatccttagatcaaacgaaaaagtgggctagagctcggatcgaaaatattaatggattaaattgctatcatgttcaaacattgaatgctcaagattttggcttactttattctgtccaaaaagataatggcaatacggcagtagtaacttatagcgttgatacaggtcattatacggctacttattggaagagcaccaagatagccaaggaacaccgaaatgcagaatttaagactttaaattaatatttgtaaagaagtattaaaataattgcaatgaacaagaagtataatttttgtaaaataatcatgtaagaagttggcggatcgtattttttataatactattaagcaaagagatagaattattgaaagaaaaggggattccttttgaaaagtaaattaactgttttggttgcaatttcagctgctttaactttagcaggatgtagccaaagtacacaaggtaatagtaattcacaatcacagtcagaaaaatcaagtcaagtttctaagagtaactcagaaaaaactggcacctcagaatcaagtaacagtcaaaactcagcaaaattatctgctgagaatatggactataagacgcaggctagtgcaatctctgtctatgctgcacaaaagtatggcgacacttgggaaattgcagttaatgctgccaaaaatggtaatttaggtgttgcgttcagaaccaaagccgcaacaggtattacttctgatgactcaggatatgtttatgaggtctccggtaccggtaaaagcagtaatgctcgttacatgctaaacggagatggagcacaaaagaaaattactatttttgttaagcaaagaaaccttggtactgtaactttacaagatgtagttgattacattaataaaaataatgatgttgatctagttcaaagcttggctaaaaatgccaaactaaatgttaaacttgaaggcgataatgacaatgcagctggtgctaaggaatctgctagtgccgtaattccatcaagcttgcaaggtacttggtacactgcagatactggcaatggcaatatcgatactttgactgtaactgctaataagatcaatgatgaagctggttttagcatggatgtaaaggctaaaaattcaggttcatcaactagttcaggctatatgaaacaagctactattaatggaattaatttctatagttttactaatatgggtcaagaaccaggtcaaggcagtacatatttggcaccgcatactgaaaatggtcaaagtgtaattgtttcagctaactctaagggaacaactaatgctgtctactggaagagcgaagccttggctaagcaaaactccaacaagcaatttagcgatctacagtattaaaagtgaataaaatatagaattaggcgatatctttgtgatatcgccttttttgttgtgaaaataaatttctaaaattatggcacttcctttcaaaacatatgtttgatataattgtaaaagtgtttgggcagactaatgaactgactattgagtaataaggaaaggaattatatggattttttagctcaaaagaaggaataccgttttaaaaatattgaaaatcaagtgtgtcgtgttcatactcatttggctattaacaacaataatttgaaagtttggagagaaaatgatgataagaaaagtagaaaggctactaagttaataatggattcactacaagatgacaataaatacatgtttcctgatttagtaatagttagttcaaaatatttgaaggtagtagctgcttacgatcgcgaaaaagatgttatttatgttaataaaggtatctatactcatcaaattgttaaatcgcatttaaagtcaagttatttcgttgctaaagatatgagaggaattttgtggcatgaatatggatataaattacattgggatgcagttaaaagcttttataaagtacataaaagtaagtataatgatatatattaaagaagcaaagatgttttttgattctaaacttgagcattatataaggctacagtatcctggttatcttaggaaagtaatcagttcgtatgcagaagatagttactttaaagaacataaaataaatgaggtagtagctgagttttctgtgataggaaatacgtgtgataaagaattgaatacaattattagggggatgctagaaaatgcaagtgctaaatgatttgaaaatgccgaataaagaaacactatattttaatgatcatattgtcccttggatagaaaaagaagagtgggctaataatgagcatacagaagtcgctttaacttttaagaaaaacaccccagtagatattattaataaatttttgatttgtcgatctgaattagcctattaactatactgcagattataaaattgtataggaagaccacatgttgtatccatatgcagaatttcctggggaattgtcaattacatattctcaaataatggtagacgataatgtaaagggtggtaaaaagcttttggtccactttgaacaaccgacagattatggatttaaagaagccagatatgagttgcctgattataaagaaatttacaactacgactttacaccttctgaaactagaaataatctagatattcttaagagaaacgaaagtctaatttggaagtgtgccgaagaggagaaaacaagtacctaattattttcggcttaaaaattttactatgactacaattgattttcatgactaataagaagaactcactataagtgggttcttttttaataattacaccactataatatcttaagtaaagctaaaaatgattcagttagaaaagagtaaatatgaaagtcttaaaaaaagtgggattagcgttgttgtcagtgatactggcatgtgtaattatcttctgtggctattatatatatttgtctctacattattatcgaattcctgataatcaaagattgaaaattaataacaatcagtctcagttattaaaagcgggggcgtagctataagacaacgacttataatgttggctttggtgcttataatcatgatttcgacttctttatggattcaggtcagttgaaggatggcaagaaaccgcaggggcatcgagggacagcaatatctaaacaagcagttcttgattccactaatggtgtcattcaaacaatgaaaaagcagaaccctgactgcatgtttttccaggaaattgatactgattcaactcgtagctttcacgttaatcaggtgaaaaaggttgaagatgattttccaaaaatggattcaacttttgctagtaatttccactctgcttttttagcggttccattgaacaatcctcatggcactgtacgttcagggttgttgagtatgagcaaatataagatggatagtgccataagaagaaaatatcctgtttctagtgggcctattgaaaaatttgtcgatttagatcgttgctttgtagttatgcgctttccagtaactaatggaaaagatttggtaatgattaactcacatatgtctgcttatgataagggcggtaaaatgcgtaaggcacagatgaaactgatttcttctgtgatggaaaaagaatatcgacgaggtaactatgtcattgtcggcggcgactttaatcatgcgttagggaaagacatgatgactcattttgagcaccaagaagaaattcctagttgggtatccgttcttgatcaaaaaatgctgcctaaagatttcactatgattaaggcgcaaaatcgcgaaaatgttgcgactgttcgtgctacagacatgaaatatgatcctaaagttaattatatgaccatttgtgatggctttattgtgtcgaaaaacgtgcaagcaaaggcgtataacattaatactcattttgagtatgcagaccataatccggttaggttggagtttgaacttaagtagatttggacaaaatgaaaaacactggatcatgaaactgtagatttatgatttagtatttacgaaattaacttatgaggtaaaatctaatgaaaaaagaattatcatataaaggttattatggttcagtggagtattcattagaagatgatactctctacggtaaagttattgacatcaacggtcttttatcatatgaaggccaatatggggtgaaataagatgagtaagattcaagagttcatcaagaaagatattgagagacatccagaattaaaaaaagaatatgaacaggtagaccttgatttagatgcttcagtattagttaaagatatgcgcgaaggttgggaaatgagtcaataagactaactgaagaatagttagtaaaataatgaaaagcattaaaattatatttgacttttaaaatgatttagactattatcttaatcaacataattattaattatttagcgatgataaggaaagtaaattggcggtccttctacagagagttatcacttggtgaaagataatgatcgacctacttttgaaaatggcctttgagcttgaagctatgaagtttttagtagcttctgggtccgcccgttatagcggtaacgtatcgccagacggccgtacgcaattcaaggtggttttccataaagataggtggtaccgcgttactgaacgccctattagatcaagttgatctagtaaggcgtttttctttttaccgtttttagcaaaggagatttttatgagaataaataaaaaagttgtttcattcggattaatagctttaactacggcaaccttagctgcttgtggtaagcaatcagatagtaataccgtttcaaaaaagcaggttttaaattggtcagagatcacacagctttctacgcaggatccttctttggcaactgatactaccagttttcaagctcttcttaataccggggacggactataccgccttgataaaaacaataaaccgcaattatctctagctactaaggctaaaacttctaatggcgggaagacttatgatttttatcttagaaaaaccgcaaaatggtctaacggcgatccattaactgctaaggattttgtatattcttataagcgtactgttaatccagtaactaagtctcagatggcattctatctttaccagatcaaaaatgcgcaagcaattagtaagggccaaaagtctccggataccttgggtgtttctgctccttctaaatatcatttgagaattcaattaactagaccactgccttacttcaagattttattgtcgtggccattatttttcccgcaaaatcaaaaagtggtgcaaaaatatggcaagttatacggcacgcaagctaaatacacagtttcttcaggcccattcacgcttactagatggaatggtaacaacaagacttggactttaattaagaataagaattactgggatgctaaaaatgttaaattaaataaagttaatgaacaggttagcgaatcaactacgactagctataatctttttgaagcaggtaaggcagatgagactggacttactggtgagcaagttgccgcaaataagaataaagcaggctaccatgcacgtttgtcttcagcgattaaaagattggaacttaacgaaaataaggttccagcattcaagaatcttaaggtacgtcaggcattttctttagcaattaatcgcaaacaattagcaaataatgtcttaaaagacggttcaatcccagctaaaggcttcgttccatcaggtatgggcaataatcctaagacaggaacaccatttgaagatgatgcttacgttaagagtgcagtatcgtataatcttgctaaggctaagcaattacttcgcgaagggtataaagaatctaagactaactcaattaaaattaccttgttagtttctgatgacgatacttcaaagcaaacagctgaatttcttcaaagtaagctagatcaacttccaggtgttcaaatttctgttcaaacaattccatatactcaattgatttcacgtcaaacagctggtaattaccaagctacaattaaaaactggcaggctgtctttggcgacccaatcaacttcttggacgttttccaaaaaggatcaagttatttgaacaatggttggaataacaatcaatttaacaagctgttgaatgaatcagaaaacgtatatggcaatcaaccagtaaaacgctgggcaagattagtagaagccgagaaggtattgatgaaagaccaaggaactattccattagttcaagttgctaagccacaattattaaagactaccgtaaagggcgtttcctttaaccctacaggcgttccatacgattttaagaacgttagaattggatagaaaaatagccgttgattacttgtataaaaaacaagttttcaatggctttttttctgttttgtgctaatacctaaaaatatccagttagatttcaggtaaaacacttgaacaaaacaaaaacgccttcaataacagaagacgttttctagagtgcgaagtattatgaattatccaattaatctcttcaccataattattatatcaggtatataaggttaattggttaatactatctatgaaatatagttaaatcagatataacaaacgataatcatatcaggctatttgttgtatgcatcgtatttttcatttaagacagaagtaatagttcgagtcattctatcgtgatatttattattctttaaaagtagcgtagtaattacgtctattacatacattattgaaaactgtgagttaataaaccgagcgtcgttaatataatttgtatcttgaacaccaactacaatatcagcaagctgagctaatgggctattgtcatagctagttaatgctacaactgtagctttattcttttttgctagttcaatggctcttaccaaggaatctgtgctacctgttgaagaaatagctataatcaggtcatcttttgaaatgatactgctagtcataaacatattattactttctgtttccgcaaacgcagatatacccattcttagtaatctttgagtagcttctaagctggtatatccagaagaaccgataccataaaaataaactctctttgcagatttgatgagttggattatcttttttaattgttttatatcaagtttattttgtgtttcagatagaactcgattgtaaaaatcatatacttggtgagcggtcgttttagagttatcttgattagtaatagtatttacttgtgaagaagctgcagcagcagccaatttgacttttaaatctgtaaaactagagcagttaactctacgtgcaaatctagtaatagtagcattactaacttttattgttgacgctaattgatttatatttgctgattgaataaactgtgggtcctgtaatataaataaagcaatttttctttcttgctgaggtaaatcgggtagcctattttgtaaatcagttaaaaacgtcatattgaaaaccttcttaatgtgttaaatcaaaaaaacagagaaagattttgtaatctttctccgcttaattatgctaaatttgtagttttttggcaaataagcaattacttattaaaatatttagcgtagatttcgtcagcgccttcaataactttatcagtgtatttagccattggttcacggttgtagccagcatgtacgcccatcttttgcaatactaacttaattgatgggtaaataccgttattaagaagggcagtgataatgtcgttcttcttgtgttctaattcttgtgccttagcaatgtctccgttgttgtaagcagcaatttcttctttaaccattcttgcattaacgttgtaggttgatccgatacagccatcgacaccttcaattaaagcaggtaacaacatttcatcgaatcctgaaagaataagcttatcagggaagcgctcacgaagtctttcaagtaagtagaagtctgcattagtgtacttaacaccgataatctttggatttgagaataatttagcaaagttatccaatgaaagtgaaacacctgttaatgcagaaattgagtaaatcaataactttgcatctacatccttaacgatttcatcgtagtaatgcttaatttcgtcgaaggtaaagttatagtagaaaggagtaactgcagaaattgtcttgtaacccaattcagtaacgaacttagctaattctttagcttcttttaagtttgggccacccacttgagcgatcaagtcaacttgttggtcaacttcgtcccaagcaatttcgaagatcttcttcttttcttctaagccaagcataaagttttcaccagttgaaccgccaacgtataacccgtcaacaccttcaacatcgatatcgtgacgaatgatttcacgagtacctttttcatcaatattaccatcttcatcaaatgaaaccattaaggctgcataaactttttgcatttgtttgacctccgtttagtcaaaataaaataatatttttttaattactgtataactaatggcaaattcaaccaacacctgcagtatagaacatgaaaacgctttacgcaactctaaattgcgaaaataattttcagaaattgaacaaagcgtaggtgtatcaagagatacagagcacgaaaattattttctaaatttttatttgagaaaattgtttttaaatgatactatgaaagcgcttaatataagaacttgattatacaggaaggcgtgaaccaaatgagtaagaaatatttagcttttgatgttggcggaaccacgattaaatacggtattgtagatgagaatcttcagatttcagatagaggcaaagttgatacattacataataaggacggacatattttgaagtcacttattaaagttaccaaagagatgatacagaagtatcaattagatgggattggtgtgagtaccgccggtattgttggagacgatggaagcataatgtatgctggaccaactatttctgactatcaaggtactcccattaagaaagagctagagcggacatttaaaattcctgtcagtgtcgttaatgatgttagtgcggctttattaggggaaaaattagctggaagtgttaaaaatgctagtactatctattgtgttgcattaggaacaggaattggtggtgcattttgggcagatggacatttatttaatggatatcatcaaacgggtaattcaataggatatacattatttgatccaataacatcaactaactatgaacagcggtcatcaaccattgcattacaaaaagaattagaacccttaggtattgatcctattgaagcctttgcacgtgccaaaaaaggaagccttagagaaaagaaaattattgatgcttgggccttgcaagttgcagagggcttaagcagtgtattattacttcttgatccagaagtattagttattggtggtgctgtttccaagcagggagattatttaaaagatttgttggacgaaaaattgaatcagattttaccgccaaatctatgtaaaaccgtattaaagatggcttctttaggtaatgatgcacaactttatggaggtatttctagcatttttgaaaattaatttctagaaagcgcttgcaataaaattgttttcgtgtatgctagaggtgtattaactaatagcaaaattcaaccgtacttatgtgaggcaaatgctgagcataattgtacggtttttttaatcccgtttattgaagaaaagaggcaagtcatgaaagtttcagtgaatgcggcaatctttgttgatcgtttgaatagcggagagagtcaaattgattgcttagaggatgtttcaaatttgaaagataaaattgacaatatccaagttcgtggagaattctttaaagaaaacaccaaagacgacgaactcgaagcaatcaaagcattgtgtaaaaagaacagttggggattgtattattcagttcctgaacaatttttcattgatggacatgtcaataacagtttgaaagacaatgttgaaatggcaaaaaagcatcaattgaagcatttgaagtatttcgtaggtgacgttaaagatgttgaccaaaaggaaattgaggatgctgcgaagcttcttgaagatgctaacgttgatttgacattggaaaatctttctaatgaaacaggctatttaagtactgttcttaaaggtcttgaagcagtaaatcaatatcctaatattggcttcacttatgatgcaggtaattggtactgggttggtgaaaagcctgaagttgcctttaaagaattaaaagataaggttactaactatcatctaaaggatattaagaataaaaaaactgtgatgttaggtgaaggaactacagattgggaaccaatgattttaggacttgatcctcaaattccaatcttcctagaatatggcattgatgataacaagattgaacaagaacttgacaaggtcaatgctgttatagacatgcggtaggtgactttgatgacgtaccttgtacaactatttttgattctgctattaactaaaattgcggcacacttttcagttaaggcaaaaatgccaagtgtaattggagaattattagtcgggattttagttggaccagctattttaaattggattcagcccaccacattcattaattatttttctcaactaggtgtaatcgttttgatgttcattgctggcctagaaggagatttgaaattattaattaaatattgggctccagctttaactgtagctactttaggagtaatttttccaactggtacagcatatcttctgtgccatacggcttttggattttcagtaaaagcatctatatttatgggcttagttttaagcgcaacatctgtaagtattacggttcaagttctaaaagaaatgaatcgtttaaatactcgtgaaggtgcaattatctgtggtgctgctgttgctgatgatattatctgtgtcattttattaggaatttgctccagtatctacggtggtggtcaccatacatcaatcattaaaatgatcattccgatggtattattctttatcattgttttgcttattggtaagtatgttgtgccaaaattcttagatatttttagtgatcttaatgcttctgaaagtgatacagctggtgcgatgattctttgttttggtgcagctgccttagcagttgcaatgggaatgagcgatgttttaggcgcatattttgctggtttagcaatttcagaaactaattatgcagacagattatcaacaaaaattgagccaattggttatgcagttttcattcctgtgttctttgtaagtattggcttacagattagttttaatggcatgggtaaggacttattgtttattgccttactaataattatagccatcttgggtaaacaaattggttgtggtatcggagcaaagatgttccatcttaattggacagaagcaaatattgttggtgcaggtatggtttcaagaggagagatggcactagttgttgctaatgtagctcttcaatcacaattaatagatcaaaatcactatactgcaatgattgttgtcacagtaatcacaacattgattgcgcctattatattgaaacttttcataatgcgaacacaaagaaaagaagtaaaaatgaattaaataaaaggggagaaaaattatgtcgaaaacaggattcggtatgtggaacaggatcgtcttaatcgcatatttgctagcgatgttaggcgttggtgcttactttactaaacgggcaagtaaaagtacagattctttcttcaaagctgaaggtaaggtgcctgcttgggctgcaggatttagtatttgggctactactttaagtgcgatcacgttcatgtcaacaccagaacaagcttttttaactgactggggttattcgattgggacgttaacaatttatttaattattcctatattaattaaatggtatgtacctttcttcagaaaattacaggttactactgcttatgaatatctggaaaagcgttttggaccagtgatgcggtcactcggaagtttgctatttatgctttatcacattggtagagtagccattgttatttacttaccaattttggctattacttccgtttcaaatattaatccaatattgattgctgttttagttggtgcaatgtgtattatttatgcattcctcggcggtattgaaggtgttatttggacagatgttattcaaggtttccttctccttggtggtgctttattaatttgtattttagcagtcgtatatactggtggacctgggaagatcgcacaagttgctgtagataattctaaattcttatctgctaaagattggaatcctaacaatttagctatgttcattccagtaatctttgctggtcaattcttcaatagtatgtatcaatataccgctagtcaagatgttgttcagcgttatcagactactccaagtattaaagcaactgccaagtcactttggacaaacggttggttagcaattgtaactatttttgtattctttggtatgggtactttcttgtattgttattaccacacgatgggaagtttaccaaaaggttttaacactagtgctattgttccatactttgtaattaccaagattccagcaggtttagccggtttaattattgcaggtatcttcgctgctgctcagtcaactattgcttcaagtttgaatgctatttcttcatgtttcgtaactgacttcaagcaaagatattttgataagaaatggaagatgaatgatgttacactagctcgtatcattattgtcatcgccggtgtatttagtttaggaattgctatttacttgttgatgggtaatgcatctcaaacttggaatatcttcctttcaattactggtttgtttggtgttccagttgctggtatttttgctgctggtatctttactaagtcagccaaccgtgttagtgctgtctggggcgtattaattagtgctgctcttacttattggtgtcaagtaatgggtgttgcaacattggtacaaccaattgtagccttcattagttcattcgtaattgcttggttaattggtttggttactccaaaatatgcacatgatatcacaggtttaactgctaaaactatcaatgagaaggttaaggattagttgaaaaaggtgaaactataatgaaagattcaatgtccttaaaagatatggagtcatatcgaggtagattagaagttccagatgattttgatagtttttggagcaaagaaatcaaaaagatagaagcaaagccatttaaattaattaaaagaaattttggcgataatattaaaaacgttgttttttatgatttgttcttcaaaggtactgataacggaatagttcatgctaaatgcatttttccagcacatgaaaaaaatattccagtagttttctatttccatggttacatgggacaagctctcgattgggttgatttcatgcaatatgctgcgataggtgtaggcgttgttgcaatggatgttagaggccaacaagggcagtcggttgataacggtacttatgctggaaataccgttttaggccacataattcgtggagcagtggatggaccagatcatctgttttataaaaatgtatatctagatgtatacacgttaattgaaacagtcgcggatatgtcacgtgtagacaaggaacatctatattcttggggtggatctcaaggtggtgctttatctttgattgctgcggcattaaatccacgtattaaaatgtgctactcaatacccgtttctttctgatttcaagcatgtactagaaatgggtgatcgaggattgccatatgatgagttatttaggtattttaagttttatgatccatttcataagacggaagacaagttgatgcgtactctgtcttatatcgatgttaaaaactttgctcatagaataaagtgtccagttttaatgtttacaggacttgaagatgatacttgttttccagcaacgcagtttgcaattttcaataggatagaaagccctaaaaaacacatgctgttaccagaatatggtcatgaagcaatgttttattatgttgatagtgccgcatttaactggctatttgatactaagttcccagaaaatccaccggacactagtagtaatgctttagaataaggtaaatttttaggagataaaaatgaaaaaagaagagtttattcaaaaagttcataatggattaattatttcttgtcaggctttacctggcgagccactttacaccgaagagggtggcataatgcctctgatggctaaagccgctaaagaagcgggtgcagttggtttgagagctaactccattagagatattaagcaaattaaggaagtagttcctgacctgccaatgattggtattattaagaaagaatatccacctgagaagccatttattaccgctactattaaggaagtagatgaattagctaaaacagatgtcgaagtaattgcacttgattgtacattgcgcccacgtcatgatggtaaaactgttgcagaatttattgatgaaattaagactaaatatcctgaccgtttattaatggctgatacttctaactttgaagaagcaaagaatgcttatgatgctggtgttgactttgttggtaccactttgtcaggctacactgaagaaagtcctgtttcagatcatccagattatgatttagttaaagctttggttgatgctggaatgccagttattgctgaaggaaaaatccacagtccagaacaattaaagaaaatgattgatattggaccagccggaattgttattggtggtgcaattacaagaccattgcaaattgctaagacatttacgagtgtttttgaataaatgatcttctgattagttataaatttcccctctcccaaaacaagctacgtttgtaaaaggcagacgtagcttgtttatttttggttataaagtcgaatttttatagaaaaagcgaggtataaaatgtcatattttattcatgcaaagaagttttatttagatcatggtgttgaagaacgaggatacttagaaattcaagataatggacaatttggattttattattctgaagatgaaaaaccaaaaagtgctgcaattttagatttcaagaatttctgaaaaacttcttcaatatggtgtaacaagttggatgccgaccacagtaactacttcatctgagaaattagatgaaatttgtaaaacgtttgctgcacataaagggcaggaaaaaggcgcaaagatattaggtattcactttgaaggctcatacttcactaaagaacatggcggtgcagaaaatcctgagtttatggaggatccttcaattgaagaatttgataagtggtacagagattctgatgggatgctgagaaagatatcactagcaccagaacgaaaaaatgtcccacaatttgtcagacatatcgttaaaaaaggcgtagttgcttctttaggacatactagtgcaacatatgaagaagcacgaaaagcccttgacgcaggagctacaatgtttaatcatacgtttaatggtatgaacttattatctcagcatacacctaatattattggctgtgcattaacagctgacgatgtatttgatgaaatgatagctgatggtcaccatataaagccgatcattttgcagatgttgtttgatttaaagggacctaatcatattgtattaatgactgattgcttacgtactggtgggatgcctgatggtgaatatgtgcttagtggtatgaaagtaacagttaggaatcacattgcattgttagaaaatggtaaattagctggcagcacattgactttggataaagcagtaagaaacttagtaaattgggaagtatgtaagccatatgaggcaattaagatggcaacatatactcctgcacgtagtctaaatgaaaactgtggttgtatcctgccagatagggatgctgattttaatgtgctagatagtaatcttaatgttctaaagacttttgttaatgggaaagaaaagtatagcgtaaagtaaaaatattattatagtgtgaaaaaggcataggttgtgatatgaacctacgccttttcttatagttaatgtcttctttatctacttgaataatgattttctaacaggaaattgtaaagaatttgagactgtaaaatagtttgtgtaaggatgaataattccttaaatttatttctttaaacattagaaaaaggggttcctttctcgtatgattggtttgaacaaaaaaacacatacagaaagaagaactccttcatgaatgattttaccaaaaatatagcacaagctctattcaatccagacaaaataaacgatttattgcgcaaagagctacaacaggctgttaataacttgctagaagctgaattgactgcctttctgggctatgatccctatgccagaaatggctggaatactggcaattctagaaatggtgcttatttccgcaaggttgatacccagtttggaccaattgaagtgcaagtgcctcgagaccgcaacggtcagtttcatcagcacacgctgcctgactacaagcagcactctgatgttttggaaagcacgattatcaagctctactccaaaggcgtaactaccagagaaatcgctgacttgattgagaaaatgtatggcagtcattatagtccagcccaagtatcaaatatttccaagcagatgctccccaaggttgaggcttatcacaagcgcaagctaagcgacaagtttttctgtgtctatttggatgcgacataccttcctttgcgccgagaaacgtttgagcgtgaagcagtctatattgccattggcattaaacctaatggacataaagaagtcattgactactgcattgcgcctagtgagaacattgaagtctggacagagatgcttcaaaacatgaagtccagaggcttgaagcaagttgagctctttctttctgatggtgttgttggcatgaaagcggccttgaccaggacttatcctaaagctcattttcaacgctgcctggttcatgtcatgcgcaatatctgtgctaaagtctgggtggatgaccgcgaaaagatcatgaacgaattcaagcagatacatcaacagacaagccaaaaagaagctgcagctgtcttgcatgaattttatgcaaaatggaataaagcttatagccatgttatcaaaggtttgagggaaattgagcccgatctgctggtcttctacaattatcccaaacaaatcagagcttcaatttattcaaccaacatgattgaatcctttaacaacgtcatcaagcgtaaagctaagcctaaggcagaatttccaactgaacagtcgcttgatgtatttattggcatccaggcaatgagctacaatgaccgctatttcaaccgaattcataaaggctttggtcaggttcaggacaccttagaatcctactttgattaaataaataattaaaaaatcaatttacgagaaagaactatttacacaaaagatttgacagtttcgattgttactactggtgccggcacaccaaaaccatatatgtctgatttaaaagctgctggaattaaggtaatgccggttattcctaatgttaagattgccaagaaaatggaagaaatgggtgctggtgcagttatcgttgaaggtatggaagccggcggtcacattggtgggactacttcaatggtattatggccacaaattgctgacgcaattaatattccattaatcgctgctggcggtatcggtgacggtcgtggtgttgttgaagcatttgttgctggtgctgaaggtgtacaatgtggtacaatcttttcaattgctaaagaaagcccagtaggtgataactggcgtaaagctgtcatcgatgctactgatactggtactgctgttgttggctctactatcaagggtggtgctactcgtggtattgctaatgaggaagctggcaagttgtttgaacttgaaaagacaggcgtatcaagagatgaatttaattcagcattgaacaagggactatacgttggtgtaagagaagatgaccctgataagagtttctttatggctggtgaagttgctggtctaattaaagaatctaagcctgctgcagaaattgttaaagatttaatggatgatgctcaaaaagtattgaataaaaacatcgaaatcatgtaatttaaagccattttatggctgtggaattaatacataaaatatttataatcaagcattaaataaaggcgaatgtaatttcgccttttttattattattataagttataaccaatagttatgataatgctaaaaattaatgatttcacaatgctagatgtaagcggtaccttataagtgtcaaggaattaaatgattccaaaattctactaatttgaaacatactctcatacatattattaaactcatctggtttccaattcagtagaaacgtagttagttagatttaaacataggaggataaatctatgtctgttaaagttattgacagtaaaactgcagcagaattggtcccagataacgctagtgtagctcttgatggctgccttggcactgatgtcgctgaagaaattcttgaaatgatgaaaaatagataccaagaaactggacatccaaaggatttggatgtttggtatggatgtggtatcggtgataacaaaggctcagccgttgaaaactttgctgaaaaaggaatgctccgtcgagtagttggtgggcttgggtcattagcgccaaagcttgcaccaatggttgcggataatgattttgaagcctttaatttcccacaaggtacaatttcacaattgtttagagatgcagctgctcaccgtccagttctagtaactcatactggattaggaactttcgttgacccagaaaatgatggtggtcgtttaaatgaagctgcaaagaattctactttggtaaatagaattaagattcatggaaaagattaattagcttatgaaacaccaaagccagatgtatcaattttccgtggtacttatgctgatgaaaacggcaatatcacatttgatgatgagcctttaaccatggctgttactgctgttgctatggcagctcacaacaatggtggtaaggtaattgttcaagttaagcgtgttgttaaggctggtagtcttgatccaaaggccgtcagagttcctggcgttttagttgattatgtagttccgactgataatcctgaaatgactaaacagactaccgattacatttacaatccagatattattaagtctaatattgtaaaagacgttaagcaaatggacttacctcttgataaaaagaaggttattgctagaagagctgcattcttattcaatcctgataccgaccattgtgtaaacttcggtattggtcaatatccaatgtattgcgcaatggttatgaaagaggaaggattatctgacaatatcgtaactactgttgaagcaggtacattcggtggcacttcattaggtggtggtagttttggtacagctattgctcctcaagctactattgatgaaccttacatgttcgatttctacaacggtggtggacttgacgcaacttacttaggtttagctgaagctgaccaatatggtaacttaaatgtttcaaaatttggtcctaagattgccggtactggtggtttcgttgatattactcaatatacacctaagattgtcttcactggtacgttcactgcagctggacttaaggaagaaatcaaggacggtaagttaaacattatccaagaaggtaaagtaaagaaatttgtaaagcatgttcaacaaattaccttctcaggtaaagtcgcatatgacagtaatcaagaagtttggtatgtaactgaaagagccgtatttaagctagttaaaggcggtattgaattactggaaattgcgccaggcattgatttacaaaaagatattcttgatcaaatggaatttaagccaattattagtgacaatttgcaggagatggatccgagaatttttcaagagccagtcatgaatatcaaaaacgataagaaatagttaagtgttttaattcatagggggatgcaaagttggatattaaccaaatccgttatttgctcacaatagcagataatgactttaacttaactcgtagtgctgaagtcctccatatttctcaacccgctattagtaaagcgattaaagatatggaatttaagcaacaagtaaaaatctttaatcggcgaaagggtaaaatcgttggattgacacgttacggtataactttagttaaggaatctaaaaaagtgtatgaacaatatattgaaatggtttcgaaactaaatgaattatcagaaaatagtaacggaactgttagattaggtattgcaccagttattatatcgaccgtgttcaatgatgcgttaatagcctttattaaccaaaatccaggcattcaactaaaaattatcgagcgtggagcttatgaattacaaaggatgttgattttaggtgatattgatctagctgtgattgtttctccagcgactgttgaaggtatttatgaggatttaatatacgaaaatacagttagggtttggtttaataaagaacatcgttttaatgattttactggtccgattccattctctgaaatagaaaaagaaaagattgttactctgacagatgattttatggttacctttcaattgaacaaaagatttaaaggtgataggctgaaacctaattattttcttcaaacacaatcatgggatttgattttaaatttagttcaacgtgataagaatttaattggtattgtggctgctccaataggaaagaattatagtgatcatgcaataaagaatgctgaaattacacctgaatttccttggaagatatcgatttgtcatactatgaattccactgaagatccaacagtagaatacgctaaaaattggtttttgaaatacttttctaaatataaaaagatatcaattgattaaaaattaaggaagaatcattatgaaagctatatttccaggtagctttgatccaataactaatggtcacttagatatcattagtcgtgcttcaaaattatttgataagttagtcgttgttgtttcaaataatacctccaaaaatggtatgttttctcctcaacaaagatatcaatttgttaaagacgctgtgtctgtttatcctaatgtttccgtgagccttgttcaaagtgatttaactgttaatttggttcatgaattaaatgctgatgttattgttcgtgatgtgagaaataatgaggactttgtttatgaacaacaaatagcattaatgactaagaaaatggaccccaatatagaaactttgattctattttcaaaccctgaatgttcatacatatcttctagtattgtaagagaaattatgctatttggaggcgatatttcagatgctgttcctgcttgtgtaaatcgtgctctaataagaatgaaaaatcaacatatggcaaggagcgtatcattatgaagactagaaaagaaattaccaatttaacgatcacagctgtatttattgcattgctttttatccagacatttgttccgaatgttgggtatgtaagaattcttcctagtcttcctgcaattactactattccattaaccattgctgtttatgggactttaatgggaccgaaatggggattgggttttggattagtttggggaattactcgtttagttgtggcctatacacaaccaggggatatggtcagcttgcttttgttccaaaatccagtaatctctcttgttcctagtgttctagcaggattctttcctggattaattagtcagaagtttaaagatagggatgcacatattcaaaagatagggtatatgctcagtggagcagttgcttcgctgacgaacactattcttgtaattttacttaccgatttaatgtttatgtctaattcaagcaccttaacaagttacttagggcatttttgtcagtcaactccattgttggtaattctagtcactgctctaggtttcaacggcttggtagaagcgatatttaatgcaattcttgtccctataattgttacacctcttaatttggtacttaaaagagcgtaaatgatgaataattttattactgttgaccgtaatcactggactaaattaaactctaagattgagcttccttcttatgaactattaaaaagttttattgatcaaaataagttacaggttacagtcaatgaactttaagaagtatatatcctattagttcaatatatattgatttgcgttcaaaataagaaaatgttctctaaattaaagacaaattacattaagagtgctgatttaaaccagccatttatcctgggaattactggatcagttgctgcaggaaagtcaacgactgctaaagtaatagagactcttattagtcaattttactctgatttagatgttcaatcattgacgactgatggctttatttatcccaacaaagtactggagcaaaagaatttaatgtcacgcaaaggctttcctgaaagttacaatgtatcactattaaatgattttctttctcaagtaagtgatggggtagaggaagtttcctatcctgtatactcacatgagctttcagacatagttcctggtaaatatcgtagcattaccaatccagatattttgattttagaaggaatcgatattttgcaaattcctgaaaatgaagagaagattatcagtgattatatagatctatccatctatattgatgccagtgaaaacttattagaggaatggttcttaactcgctttaaatgtttgctagatattaataaagataatcctaataatttctttcccggatttaaaattgaagtgcaacactaagtgttaaacaaaaaggccatgaagacctaaacttgaagtgacgaaaaatcaagaaaggaagatcttcatgaccaattcaaattctagcatttctaagcactatcatcaattaaccagcgtacaacgtggacaaattcaagcaatgctggattccggcataacttcccgtactgttatcgctcaagaagttggctgccataagtcgacaatcagtcgcgaaatcaaacgcggaagcgtcctgcaaagagacagcagctatttattgtatgagcactattacgctgatactgcacagatttattatgagaagcgtcgcaaaaactgctatcagcgcaatccattgaagcattatgctgtctttttgagaatgctctccagacgctttaaagctaaatttgatgccaccagcatcgatgagttcgttggtgaattcaaaaggactatgccaggctacccttgtcccagcacaccaaccgtctatcgctatattgatcagggcttgctggacataagcaatattgatctgcctatgaagctcaaaagacgcaggaacaagcgtcatcacagccatggcggtcacgctttgcacaagaagcatcttggcaattccattgaacagcgtcctaaggaggttgaagacagaaaagctccgctgcactgggaaggagatctggttaaaggcgtcagacgcaagaatcagcctgctttaatgactttgactgaaagaaccacacgctttgaagtagttatcaagattcctgactatcgggcaagcacatgccaaaggctgcttcaaaaggagattgacagacatcctgcctggtttaaatcaatcacgtttgacaatggctctgagtttgcggatatgaccaagatcaagggctgccagatttactttgctcacccatattctccatgggaaaggggcaccaatgagaactgcaatggtcttttgcgtcaattcttccctaagggcaagagcatgaaagacaagtcaaaagcttatgttcaacaggcaactgatgccattaaccacaaatatcgccgaatcctccaatatcacacagcagaggaactcttcaagcaatatatctcttcataacctaactgttgcacttaatttgacaattcaggtaataatttcttttatcattgggctcatattcctttagatgaatcaattgattatgcaaaaaaggtttggcggacagttaatttagttaatctacgtgactatattgtaccaaccaaggaaagggctaatatcattctttataaagatgtaggtcacagagtaacatcaataaaaattcgaaaatattagaagtatctctttctaagcagttcatgagaaatcatggactgcttttggtttaatgtccgtgatctcatcggggtgcaaaacaacatatacgaactagatccacgatagagtataattaggttgaaaacttaaggcagaatagttgtagagtggagggaaaaatgacaaaatatgtggtaaatagtgaattaagcgatactgaatggcaaattgaaaattcaactgccagatatcgctttatagctgacaatggtgataaaactggaggccctgatcctgttgaatatttaactggggcattaaattcttgtatgtctatttcagctggattgcttattaaggcgcaccatctggacgttcaaaattttaagattaatgcggaagcgaataccgagagattatcacacggaatgccagatgttgatacgataactatcaaaatatcatttgatagtcctatgtctcatgaagatcaagataaatttgttaaagatattttaagagtatctactgtctatcaaacgttgaaaaaagcgatcaagattagtattgagtggaattagcctaagttaaaatgactagtacgaaagaagcactgaagctaaagacaaataattctaaatacaatgcagtagtaaggccatactgcaatatcaattaataaagcaaccagtgtagataaaagatctatactggttgcttttgtttgatttaagttagtgacagtatcattaagttaagacattgacaaatttgacgcttttggaaccgaatcattttgattcggttctttttctttttacaataaaataaagagtgagcagaagtctatatctgcttactcttttgtctcttatcaatttttttataaaaagagcgtagttctcatgaaatcccttcacacaaacattttaaaactgatgaatcagattatcgataaaattcaaaattcattattgacaaaacaataaaataagattagcataatattaaaattatttaagaaaggagctacatatcatgttagaatcacaaaattcagcaacagtagaattacgacgccgccaccaaaatgatggtttattttgtgatcctaaattatggtgtgcggcgaattttgtttaaaaataattaattaagttgattactaagcaaggttcacattcctaattgggatgtggacctttttttgttacagaaaagagaaaaaactatgaagtcaattaaattatttggttcaactggtctacttattggtgctgctttaactttagtagcatgtggtcaaagcaatacaaatgcagcaaaaagtgcaaagaaatttcctgaacaaactgtacaaaaaactgcacagaaaggtggcactttaaactacgcaatcgaaacagatacgccttttaaaggtatttttgatagtcaattatcagttgatcaagttgattctgatgtcatgcaatttggtaatgaggggttattcgatactgataattcatatcaaatacgcgtggtgctagttaaatcgttttagttaataaaaaagtccaatcggattagactcaagttgtaagtaaattaaatagaaaagagtctgatctaattgaactacctcaagcttaatcgtttctctcaccatttacaagttagttttagtcgtttaaatgtaatttgtcgttcactatataatctttatgcgcctgataagcttacgcatcgaaaaaacattgatcaaacaaagctttccgacagctccatcttagcgatgctcatttggcaaactgaaattggaattgaatcccaaagaagattctgtaaattttttgttggcttatctcattctcgctttaatcgtcgagccaagatgcttttgcctttaattcgctgcatccgtcaagcttggaatcaagaggtaaaggttgctggagaatttttaattattgacagttttcctgttccagtttgtcagcctgttcgtaattatcgtgttaagatcttccgtgacatagccgatattggctataaagcaaccaagaaagtctattattatggtttcaaggtgcacgcgctagtaagcgatgaaggctatttgcttgactacgcagtcactaaagcatcagtgcatgatgccaaagaaacagtagaattgatgattaatgctcatccaattaaccattatcttttaggcgatgaaggctacttaggaaaagacttagctgccgagttaaaaggtatgggctatgtcctttggacaccatatcgaaaaaacatgaaaggtgctaaaaaacataataatcatcaactgatggcaattagaagaacaattgaaagcgacttttctttgctcagttactataacgctgaaaataaccgagcaaggagcttagctggctttcagcagcggctagaaatagccattttagcttataatatggcatattgcctagaacgatttaactagcaccacgcgtatatcaaattaataataaaggacctgctacttttaaacttgataaaaatgcaaagacaattactattacggtaaaaaaaggtgttaaatggtcggatggtaagcaagttgtagctaaagacttagaatatccatatgaaatgactgccaacaaagcaactaatagtttacggtattcagattctttagaaaatattgttggtatgaaagcttatcacaatggaaaagcaaaaactatttctggtattcaatttcctaatggtgaaaatggcagaaccattgtcattcattttctttcaatgaagcctggtatgttgcaatcaggtaatgattactttattgaaactgctgctccgtatcattatctaaagaatattcctttcagtaaattggtttcatcagatcaaattagaaaaaatcctatcttttttggcccttataaagttagcaaggtagttagaggacaatctgtaacttaggttccaaataaatattactggagaggtacaccaaaattaagcaaaattgttgctcaggtagtttctactaattccgcatcccaagctattaagagtcataagtttgatatagccgatgtggtaaattcacaatggcaagcagttaaagatgcgaaagatacaaaattcattgctaaaattcctcttgcttacagctatctcggcttcaaagtgggtaaatggcaagatggtaagaatgttatgaatcctaattctaagatgaatagcaaatctttacggcaagcaattgcttatgcaatgaatattaatcaagttgaaaagagatacacgcaaggtttgacttttagagtgccaaccttaattcctgaacaatttggtgattactttgataaaaattctaaaggctatccttacaacttaaagaaagcaagtgaattgttagataaggcgggatataagaagaaaggcaaatggagagttcaacctaacggaaaaccattgagcattcatttagcagctatgagtgggtccgccgttcaagaaccaattattcaaaactacatccaacaatggagaaagattggacttcatgtgagtttaactggaaacagattaatggaattcaattctttctatgataagttagaccaagacgataaaaatatagacatgtttattgcttcctggtcattgtctagtgaaccatcacctagaggaatctatagtgaaactagtgcaatgaatgactcaagatttgtgacaaaagagaacaacaaattactcaatgaaattgattcgtctaaggcgtttaatcatgcatatcgggttaaggcctttcataagtggcagcaatatatgaatgatgaagcttatattgtgccaatgactaattcttactccattaaggctgtgaatagcaagctggttaactattcacttaaaccggctgaatcaaattcgatttggtataaggtgggatttgctaaataatctttcttaagaaaaattcccttccagatgattgaaaacgatcaagattttcttttttgagaatcttggtagttttttatgatttgtaattttataaatgattaggcagtttgaagtctatatgtgtatatttaaattgtataaaatctccttaaatgctgatataacaaggattatttaatatagctttttagcctaatgaagataactatggttatatttatataatatattatatattttagagcagaagtaaaaaaattcgaaattgtttattaattatctgaaaattgaaagcaccaaaatcaagctcaagtcctgtcactattgagctttcttagacgtaattagtttttatatgatctgtttcagtgcaatttgtatgaatcgtggcagttggttaataaagtcattgattacttcatctatcttttcaaaactattctgtttaagctcttttaattctgaaattaagtagaccaatgcatctacgaatctaatatcaggtaaggattcgttcattagatagaataaatctccgattgtcttatcatctgtattttgtctttcctgccaggtcaatagatcataagttattgctgtaactgcgatatagccacattggccatcatagctttgaacttgagatttatctaaagcaagatattgcttagacgtcttaaaatatgtttcaatttgccatctacgaccataaagttggatgatttcttcagggctaagctttgtctgagtagtagctaaaactaaatacttgttcttgtttccacggttggagacaaagacgagctttaataaaaagctatgtccatgatattgagcctcaactatgcttgaataaagataatgtttctttttacggatgtttgaagcagccaaacgatcatacaagtctttaacgctatagcggcgatggcgataaatgtaataaatctttgaactcttcttgatcatgccaagtccatctaaaccgatcttctttaaaatccaaaacattcttggagaagaaaaccaagaatcgaataagacgtatttagcttctactcctaatcgtaaggcttgtctaatcaactctacagttacatcattcatctttctctgagcttgatttctccttttaccagaaattgaacgttcatcagcagtaatgggagcagctccaatcatatttttcttggttttggttgacatcaaggcaaagttaaccggcaagaaggtattgccatcgctccagcctaaagttaaaccacgatatccgttcaaatactcatgcttgtcatggtcatagactttagctagcaattcggtctttttagaaaaagaccgagccatcagcgtatcgtcaacgataaaagcaagtcggcgtcttttatcgataaatggttttaagcagccaatgagccgggctgcaatcaagcataatagtttttgcagttgattcttccatcgttaagtacattgcgagcagttctaacggaaaaacgtttgtcatccttagctctgaataaagaaagccgagcaaaatgtactgacatcagccaagagataatcatggttaatgaaacggtggatttacgcttaaaattgacttgtttagttaacttagctagaccaattagattaataaatgaagaaattaaggatttagtatcgttttctgtgtcgatttgttctatactgttcattgcgcaggatctcctttactttttaggtcgacacttaaagtataacgcagagagatcctgcgtttttatttttgataagaaaaagccaagaggcgcggggaaagagcgttaatcttagctttcaagtttcagttaattatatagaaatggttatttaatttgcttaacctaatgctatcgcatttgaaagagctttcaatatcttttaagatgttatctaggtttgttattaaatatttacgcatatagacttctttatttaacctgctaccctattaagtgaagagacttataacgaagtttaagaaaccgactacttcttaaataaatgagtttaaatttaaagcttgaaaataatgaggacttaaaaatttcgagctttcataaataataaataggggattaggaaaatgaaaaagagcattaaacttttatcaacaattagcattgccgttgctttagcaggtggtgcaattactgcagttaacaatcaagaaacttcaaatgttgatgctgcatcaataacattaccctctggttacaccaaggatgccgttatcaaatggaaccaaactggtaaggccagcaaggctttggtaaatgcctcaattaagggtatgaaagaaaataatgatagtgatgctggttcagacaacaccttggttaatgtaactaagttaactgatagtcaaaaagttgaattaagcaactacactttggaattgattaattctgctcgtaatcaacttggcaagcaatcttggacttacaagcgcggtgcattaaattttgctgaccgtgtagctaatcaatattactcaaacaacaagtcttgctgggatcctgatcactatgttactggtattgaacgtgcagccaaggcttcaggtcttaactcacgtgttggtcaagtttacgaagatgaagcaggtttgccaatttcttcagaatttaacaccaactaccgtacaatgtcggctttgaagagccaaatctacttcaacgttaagcagatgctcttcggtggctttgctggctcaagtagccaaatgggcgatgcttctaagtatactgaatgggaacacgctggcgacttgcttggctgccgcactaagcgctacatccaaaactacaagaaattcaataattaatctgacgttgtagtttgaaactaaaaaagtttcctaatccaagagttcaaacggtttagtcacctgtctgggctctttttaatttgcttaagaatattttgaataatatgattaaatttctattatgtgagattttttcaaaatgtggttgactgtaaacaacaaatagtaaagaatacagttaatgaaaagcgaggaagaacttcataagttagtggaaaaggttattgatgattttgctgcttgggatgaagatgagcgctataaggagccagaaaaagaactacgtcagctgttggaagatagtaaggtcttgggctttataatgtacactagattgagtgatattctgggttggcatcatcgtatgttgactgaagccaaggaagagagaaccttaacagctaaggaggaagtattactgaatgacatggatgcagttcatgattagatggaacgaaccatggatgaagagaatggtaggttgtagaaagcattaaaattacagaaaaataaaaccacattgctcaaaaattgaagtgagtaatgtggttttttacgttgtaattattgtagtagccaatcaataagattgattttttgaatcccgtcgtagttggctgtgggattgatagtatcaagggttagtaaaagtttggaatgaactccaaacaaatgacatttattgctgctttttggagtcaactccaaaaagctgactttatcgttttgatggaattgaataggggcaagggagatattgtaaaagcgagtgtcgagtaaatagtgaactgagacctaaaagttagacacttttaggtctttttctacgtaaagtcaagcataataagaagtttgacttcattttttgtttaaatttcaacttaaacatcttttagtgtcgatttatttttttagttagacacgacaaataagcccagatccatatctgatttttgggcttagcgttataatgtacttgatcaattaattacgactaaagtctttttgattatgtgtggctacgttgtaatcatatggttgatcattgataatcagggcataaatggttctgattagtttatgaattgaagcaatagctatctttttgaaccctttggtttgagaggatagctttttgctttcataataatctgctatatgacacggatttgtcttagctgcattatcaatttgtccaatagctcgataaagcaacttacgtgcgactgcattgccatgtttagtaatacttaaattagagtccatttctcctgactgatatctgcctggatcaattccgataaaagcattgattttattaggattactaaatctgcgtaaatctcctaactctgctaaaactctgacagcagtggtctgtgcaaagcctggaatgctttctaggttttctaaatcatgattaggcaaagacttcgctaacttaaccattcttgcgattaaattttctctttgatcacttaaattaagcaatctgtgtgcataatactgcacttgctcgacttctatgctagagcaagatgcaactggataagcttgataagctaattcaattaatttatctgcagtccttagagcgtgtttaaaagcaatcccctttaagctcattaaccagttaataagctgttttttatcttctcttcttactaagtcacaatgaggatatcgcacaactatttgccagtaatttttacctttagcagaagaaaatagattttcaatttcaggaaaagtcgattgtagagcttggtaaagtcgatttttagccattactaagtcagctgttaactggtcatagaagcggctcaaagcattaagctgcttataagtttgagattgaagttgattaattggatgatgatatagtctttgaattaaggctaaatgataagcatcagttttatcagtcttattatgacgtagtcccatatccatttcttttttagctttaagaggattaagaattacataatcatagccatagtcttccagaaaagattgcagtgtacgtgaataaacaccggtagcttcaaaaataatttgcggatgtttagaaaaagcggttaattcatgaagcaattgaataaaaccaggacgattattagtaatggttagttcatttttgctttcaccaattagttcacaaacagtagaagtagacttgcttacatcaattccaaaagtaacttgcataataaaaacctccaaaacttagtagtaaaacgtatttacttaagaaatcagatctaattttctaaactcgacatctagtgtccacattcttcgaagagactattgaaaacttaagtaaaactgccagtttattatgcgacatcaagtgtctaaagacctcagggcatatcgttttactactactttaattctacaaaagaataaaaatagtgaatcaattatcccgtcggataactaattcactatttagcttagaatgtttactatgtctaaatttaataaagaacaaaaaatagaaatttatcataaatggaaagatgaaaatatctcaatcagtcaattggctaaagcgtacagaatgaatctagctaatttagactatatgcttagattaattgatatgcatggaatagaaattttaactactaaaaaccaaagctattccaaagagtttaagcagcgaactattgaacaagcaatctttggcaataaaccatacttacagctgcctttggaactggggtttaaaagtattggcatgcttaacaattggattagagaatataagaaaaacgggtataatgtcattatcaaacagaaaggacgccctgcccgtgaccaaagaaaagcagaaatctcgcaaggaactggagaaagagatccagcagctgaaagaagaaaacttgcgattgcgtattgtgaacgaatacgtaaaaaaactaagtgccttggatcaagaagatcagaagaaatagctagggtgattacggatctaaggcaagaattcaaagttagtttaaattatgtattagctgcgattgcagagcaccctgagctacctataattgccagaagctcatactacaagattatcaaacgacagcccgtcaagcctaaacggtcaaagcttattgctagaatccatgagatttttaatcatcatcaaggccgctatggatatcgcagagtagctttgcagttaatcagagagggctggaaagttacggagaaaaccgttcgctattggatgcataaattaggtcttaaaggcatcaggcgcaataagcgcaaatattcaagctataaaggtactattggcaaaatagctccaaatttaattcatcgtgatttcttcgcagccctgcctaacacaaaatggtatactgatatcactgaatttcatcttaataatgaaaagctttatttatcgcctattctagacggctgcggtggcgatatagtttcttatactatctccaaacatccagatatagatttagtaatgacaatgcttgacaaggcttttgccaaagaaacagctcttaataactgcatttttgatactgatcagggctgtcagtatcaaagccctcgttatcagcgagctttaaaactccatggtattactcaaagcatgtccagaaagggcaactccatggatgatgggctaatggagaacttctttggcctgctcaaaactgaaatgttctatgatcaagaatacaagtatcataatcttcaagaattaactcaagcaatcgaggaatatatcgaatactataacaacgaaaggataaagagcagattaaaaggcttaaccccgaaagagtatcgaagtcaagcctctattaatccaatattttaattgtctactttttacgtctcagtacatttttacattaattactattatttttcttcttaattagttaatttaaaaagttctggtcaaaacctgacacctttgacacttttcctctcaacaccttgatactactagctttatccatcatatctccattgacaccaaaacaattcaaaagctacccaatgcttgatataacaataatctgctagtgtcaacttaaccaacaccagaccgacaccatttgagttaataactgacacttttcaaatttcaagattcggtgtcaacaacggtgtcgcacatcgactaaaatgtgtcagctaaaccgacaccaaattttaacttggctatgtagattctcaaccattcgcactatattaaatgcaagcctgttcaaaaacttttagctttttgaatgaacgtgctgggcctacaacatcaagcttaaatgatgttcagaaacttatggtcaaaaaggatggattgaaatgacggaatatggctatgctagggtgtctacaaagggacaagaactagcagatcaaattaatcaattgcaaactgctgggatcagtgaggattgcattttctccgaaaaatttactggaactacaactgaccgaccacaatttgctaaactaactcaattggcgaaaccgggtgatgtgattacggttaccaagctggatcggttagctagaaatacccgggaagcattaaatgttattgacccactaatgaatcaaggagtgaagatcaatgtacttaacattggcatgttggaaaactcaactgtgggtaaattagttaaaacaattctcttagcagtggcggaaatggaacgggatatgattgtggaccgcacccaataagggaaacgttatgctaagttacaccggtctgattatcatgaaggacgaccccaaagagccattaccccgcactaccaagccgcttatgagtacttgcttactcattcctacaaacagactgcgagtgcttttgatatttcgatttcaactttgcaacggatccgaaagcaggtggagcaaaataatatagcttagttttaaaaaagtatatattattttgcgctggaggatttgaaaaatggtaaaatgttataccccatttatttactggattgatactaccggtctagactggcaaagcgatgaaatcattcacctaaccataacggatttatttggtaacattgtgttctcacatctgtttaaaccagtgaaaattgaaagttgggacccaactcagcagggtttccacacaaaagcacttgccccccccacatattcaatatataataaattacgcgtggtgctagttaagtcgttttagttaataaaaaagtccaatcggattagactcaagttgtaacttaaattaaatagaaaagagtctgatctaattgaactatctcaagcttaatcgtttttctcaccatttacaagttagctttgctcggctaaatgtaatttgtcgttctttgtacaagctttgtgctcctgatgagctgaaataccgtaaaaatattgatcaggttaagctcttagacagttctattttagcaatgcttatttggcaaactgaaattggtatcgaatctcaaagaagattttgtaaattctttgtcggtttgtctcattctcgctttaatcgtcgggcacgaatgcttttgcctttaatgcgctgtatccgtcaagattggaatcaagaagtaaaaacagctggagaattcttaattattgacagcttcccagttccagtttgtcagcccatccgcaactatcgcgtcaagatctttcgtggcatatctgatatcggatataaagccactaagaaaatctattattacggcttcaaggttcacgcgatagtaagtgatgacggctatgtgctttggacaccatatcgaagaaacatgaaaggcgctaaaaagcataacgatcatcaactgatggcaattagaagaacaattgagagcgacttttctttgcttagctactataacgctgaaaataactgggcaaggagcttagctggttttcagcagcggctagaaatagccattttggcttataatatagcatattgcctagaacgatttaactagcaccacgcgtaataaattgcgtcttagaaagaggatataaaatatggacaaattacataagcaacaagtagcaaaacgacaacgatttgccattaagaaattaacagttggaacggcatctgtccttgttggcttaaccttcattattagtggtaatgccaaggcagatacgacagttgctgctcaaaatacattcacgactcaagtgactgatccacaagttagtgcccattcaagcaatattcggattagcgacgaatcaaatacggttgttcatcaaacttcatcaacattagttccaaataaaacaacaacgccagcgcaacaaatgccgataatccataaaacacagcaaaacaaccactgcccagtaagtacaacaaacacagcaaaacaaccactgcccagtaagtacaacattactatgaattttcgcgatgtcaccctacataagccaattcaagtgattagtaatggtcattatgtattcaaacaacctttcaagcagaccacaattcgaccaggggatagtgtggatcaagaatttactgtggccggttataaattaatgaattcagaagttttgaataagtatttctattttgataaacaaggtaatgcctgccttaagaaaggtattactacgcaagacattaacattaatttagattacgcatcattgtcaccaatcaaagtagagtatgttgatgtagataacgggcatattttagcatcaatcgttctagatagtttctggatggcccctgaatctccacaacaccgtgctggtgataagaaagcaccggatgcatcacgctatgaagccgcagccattaatattcctggatataaattagtttctgaacctgttttaaagggtaaaatcactggtcaaactcgaaattcgttagctgatcctaactatgtttatttaactttcaagtataagaaggttataaaaaataattctgatagtaataggactgaattgttacttgttccagaagaaacaaatctaccgtacaaactctttacgattgctggtagctatggcgaaaggattgacctaaacaatggtaattatgagaaaaaaatgagtgaggagattagccattacgaaaaacaaggttactcctatataggaagtacagggacatatcttaattctgattatttcaattggtacgctaaggggatacatgtttacttgctaccaaacaaaccagtaactgtgaggtacattgatgagcaaggaaatgtgcttaggaataatgatacgcttgcgttcaacctagataatcctaaccaaaaaaataatggggttaatccgcaaaaaggctggtatgcaaagggtccatggcaagtccaacctaagaaaattaaaggttatcgtcttgttcgtactcttggagcgacgagtggccagtatactgtataccagtacatcacaacttttgtttacactaaggacacagatccaactgatcccaaaacgccagagacaacaacaacaacaacaactgatccaaagacaccaagcgataagcttccggacaatcctggcaagtctggtcagacagttccagttaatattcacattcctgatggttatcaattagttcctggtgaaagtgttccaacattttacaccttcaaggatggtaaccctaatcaaatcattagttgttggttgatcccaactaatggcggtcaaccaacaactaatgatcatcaaggacaaggaacaccagctactaatacgcctacaaacactactcctaatggaaatgctgttactggcaaactagaaggtaatgttcctaacatgcaaactgggaagacgattacgtttcaaccaacgacagctaaggataaccaactaccacaaactggtaatgacaatagcttaacaaccgttgccgggattattgtaagcctgttaaccagttgcttagctgttcttggcattaataaacatcaaggctaatatgattacctaccaaccattccgaagctaatcaagacgcgatgctttaattagcttcggaattttgaatgatatatcattataataggatggaataaactttatataaatataagtaatggggattgatttctaatcttttaagaatactgtttatggttgattttttatacaatgtttccaactgagagtaaatataaaaagggagatactatgttatcagcaaagaattattacggccgtctggtaaagttaaaaccaaaacaagatcatttttcacttcgtaagttatctattggtcttatttctgttaccataggtattaccttatacttgggagtggacaactcctatgttatggctgatacgaatttgagggataataacaatcaacaattagccggatcgggtaatggcaccaatataataaatgataaagttaaaattccaaccggtgcttttcagtctaaacaaatgcaaactgaaaattgcaaagtaaataatcagatgttggataaaactgaagtaacaaattctactaaaaattcttctacactaaatgtggaaaattccaagactgctgatttgtcgagatttgattactctttatatacaaaaaaagtaaagagttttgaatttagaaattcagataataacgatgtaattagaacagtaatattaaacaaacctaccggtgttgaaactgtaactatgactttgaatgttagctgcttaaaagggagaaagcatcagcatcgatcgcacacatctactagatcgagtatttataattataaacctcaagttattgctgaagtaaatacatccaataatccattgccaaaaatatcaattttggagaaaaacgttttaccaaaaactttttttcaagtagataagaatacatttcttactcaacaggataaagagaactatgagaaatttatatcagttaataagaatgatattagcatagaattaccagctttttccattaatgatattgatattccaggctattcttatcatattaatgcaaaaaagactactcctggagcaggattaggtaaagaaaagttttacatctacactgaatcaccacaaacagttgttatcgactataccccgattacggttaaggttgaacataagatcatcacggtaacaccaaccgatccgaagacaccaagcgataagcttccggacaaccctggcaagaactatccaaagggtgttgacaagactgatttgaataagacaatcacgcgaaagattactgttatcaagcctgatgggacaaaggaagcccatgatcaaccggttaacctcacccggactgctaccgttgatgaagtaaccggcaaagtaacttatagggactgggtaccaggaacctgggataactttgatgtgccagccgtatctggctacacaccaagtcaaagtaacgttccgaaacaatcagttactgatggcactaaggatactactgtaacaattacctacacgccaaccgaacagactgggaagatcacatacgttgatccaaacggcaaagaagttggtactaccccattaacaggaaagacggatgaagagattccagttacaccaaacgttcctgcaggttggcagattgttcctgatccaaagattccaacaaagatcaccgctactccagacggcattcaaacagttacggttaaggttgaacataagatcatcacggtaacaccaaccgatccgaagacaccaagcgataagcttccagacaatcctggcaagaactatccaaagggtgttgataagaaagatctgaacaagactgttaagcggacgattactgttaataaaccagctggctcaactgttgatgctagtcaagagactactctaactcggacggctactgttgacgaggttacaggccaagttacgtatggcaaatggacaacctcaaagcttgataagtataatgcaccagaaattccaggttacactccaagtcaagcagaagtccctgcagttgatcaggtaacggttgattacacagatccaaaaattgaaattacctacacgccaaccgaacagactgggaagatcacatacgttgatccaaacggcaaagaagttggtactaccccattaacaggaaagacggatgaagagattccagttacaccaaacgttcctgcaggttggcagattgttcctgatccaaagattccaacaaagatcaccgctactccagacggcattcaaacagttacggttaaggttgaacataagatcatcacggtaacaccaaccgatccgaagacaccaagcgataagcttccagacaatcctggcaagaactatccaaagggtgttgataagaaagatctgaacaagactgttaagcggacgattactgttaataaaccagctggctcaactgttgatgctagtcaagagactactctaactcggacggctactgttgacgaggttacaggccaagttacgtatggcaaatggacaacctcaaagcttgataagtataatgcaccagaaattccaggttacactccaagtcaagcagaagtccctgcagttgatcaggtaacggttgattacacagatccaaaaattgaaattacctacacgccaaccgaacagactgggaagatcacatacgttgatccaaacggcaaagaagttggtactaccccattaacaggaaagacggatgaagagattccagttacaccaaacgttcctgcaggttggcagattgttcctgatccaaagattccaacaaagatcaccgctactccagacggcattcaaacagttacggttaaggttgaacataagatcatcacggtaacaccaaccgatccgaagacaccaagcgataagcttccagacaatcctggcaagaactatccaaagggtgttgataagaaagatctgaacaagactgttaagcggacgattactgttaataaaccagctggctcaactgttgatgctagtcaagagactactctaactcggacggctactgttgacgaggttacaggccaagttacgtatggcaaatggacaacctcaaagcttgataagtataatgcaccagaaattccaggttacactccaagtcaagcagaagtccctgcagttgatcaggtaacggttgattacacagatccaaaaattgaaattacctacacgccaaccgaacagactgggaagatcacatacgttgatccaaacggcaaagaagttggtactaccccattaacaggaaagacggatgaagagattccagttacaccaaacgttcctgcaggttggcagattgttcctgatccaaagattccaacaaagatcaccgctactccagacggcattcaaacagttacggttaaggttgaacataagatcatcacggtaacaccaaccgatccgaagacaccaagcgataagcttccagacaatcctggcaagaactatccaaagggtgttgataagaaagatctgaacaagactgttaagcggacgattactgttaataaaccagctggctcaactgttgatgctagtcaagagactactctaactcggacggctactgttgacgaggttacaggccaagttacgtatggcaaatggacaacctcaaagcttgataagtataatgcaccagaaattccaggttacactccaagtcaagcagaagtccctgcagttgatcaggtaacggttgattacacagatccaaaaattgaaattacctacacgccaaccgaacagactgggaagatcacatacgttgatccaaacggcaaagaagttggtactaccccattaacaggaaagacggatgaagagattccagttacaccaaacgttcctgcaggttggcagattgttcctgatccaaagattccaacaaagatcaccgctactccagacggcattcaaacagttacggttaaggttgaacataagatcatcacggtaacaccaaccgatccgaagacaccaagcgataagcttccagacaatcctggcaagaactatccaaagggtgttgataagaaagatctgaacaagactgttaagcggacgattactgttaataaaccagctggctcaactgttgatgctagtcaagagactactctaactcggacggctactgttgacgaggttacaggccaagttacgtatggcaaatggacaacctcaaagcttgataagtataatgcaccagaaattccaggttacactccaagtcaagcagaagtccctgcagttgatcaggtaacggttgattacacagatccaaaaattgaaattacctacacgccaaccgaacagactgggaagatcacatacgttgatccaaacggcaaagaagttggtactaccccattaacaggaaagacggatgaagagattccagttacaccaaacgttcctgcaggttggcagattgttcctgatccaaagattccaacaaagatcaccgctactccagacggcattcaaacagttacggttaaggttgaacataagatcatcacggtaacaccaaccgatccgaagacaccaagcgataagcttccagacaatcctggcaagaactatccaaagggtgttgataagaaagatctgaacaagactgttaagcggacgattacgtctcaaccaacgacagctaaggataaccaactaccacaaactggtaatgacaatagcttaacattaatgggcttaggtgcctccaccttattgggaatgtttggccttgctgctgtaaacaagaagcgtaagtaatcaaattagctctacaattttatccctttgtcagtactgatgaggtattttgatgaggttagtttaagtagcgaagctgcttgagctgaccttttcttttagcttagtttttaccatgagatttgagagctagtagacttcggatacgggaatgatcaaagttgcgaaaaccataagctgttattctagtggtcttaattttattattgtaagcagtcgttatcaatacgggttgaacaaagggactctacaattgtaagtactgatgaatttaacatcagtgcttattttggttttctacgaatagtcaaggatattaaaggaattccttggaatttagctggatagaaaagttaattaaataattaaaatggctcaaagttaaatttaaagtataacaaaacaagctcatgaactagatttattgaacctgtcaaatcttttgtgtaaatagttctttctcgtaaattgatttttgaattatttattcaaaataagattctaaggtatcctgaacctgaccaaagcctttatgaattcggttgaaatagcggtcattgtagctcattgcctggatgccaataaatgcatcaagcgactgttcagttggaaattctgccttaggcttagctttacgcttgatgacgttgttaaaggattcaatcatattggttgaataaattgaagctctgatttgtttgggataattgtagaagaccagcagatcgggctcaatttccttcaaacctttgatgacattgctataagctttattccatctggcatagaatttgtgcaagacagctgcagcttctttttggcttgtctgttgatgtatctgcttgaattcgttcatgatcttttcgcggtcatccacccggactttagcacagatattgcgcatgacatgaaccaggcagcgttgaaaatgagctttaggataagtcctggccaaggctgttttcatgccaacaacaccatcagaaagaaagagttcaacttgcttcaagcctctggacttcatgttttgaagcatctctgtccagacttcaatgttctcactaggagcaatgcagtagtcaatgacttccttatgtccattaggtttaatgccaatggcaatatatactgcttcacgctcaaacgtttctcggcgcaaaggaaggtatgtcgcatccaaatagacacagaaaaacttgtcgcttagcttgcgcttgtgataagcctcaaccttggggagcatctgcttggaaatatttgatacttgagctggactataatgactgccatacattttctcaatcaagtcagcgatttctctggtagttacgcctttggagtagagcttgataatcgtgctttccaaaacatcagagtgctgcttgtagtcaggcagcgtgtgctgatgaaactgaccgttgcggtctcgaggcacttgcacttcaattggtccaaactgggtatcaaccttgcggaaataagcaccatttctagaattgccagtattccagccatttctggcatagggatcatagcctagaaaggcagtcaactcagcttctagcaagttattaacagcctgttgtagctctttgcgcaataaatcatttattttgtctggattgaatagagcttgagcaaaatctttggtaaaatcattcatgaaggagttcttctttctgtatgtgtttttttgttcaaaccaatcatacgagaaaggaactcctttttctaatgtttaaagaaataaatttaaggaatcattcatccttacacaaactattttacagtctctccaaagagtttaagcagcgaactattgaacaagcaatctttggcaataaaccatacttacagctgcctttggaactggggtttaaaagtattggcatgcttaacaattggattagagaatataagaaaaacgggtataatgtcattatcaaacagaaaggacgccctgcccgtgaccaaagaaaagcagaaatctcgcaaggaactggagaaagagatccagcagctgaaagaagaaaacttgcgattgcgtattgtgaacgaatacgtaaaaaaactaagtgccttggatcaagaagatcagaagaaatagctagggtgattacggatctaaggcaagaattcaaagttagtttaaattatgtattagctgcgattgcagagcaccctgagctacctataattgccagaagctcatactacaagattatcaaacgacagcccgtcaagcctaaacggtcaaagcttattgctagaatccatgagatttttaatcatcatcaaggccgctatggatatcgcagagtagctttgcagttaatcagagagggctggaaagttacggagaaaaccgttcgctattggatgcataaattaggtcttaaaggcatcaggtgcaataagcgcaaatattcaagctataaaggtactattggcaaaatagctccaaatttaattcatcgtgatttcttcgcagccctgcctaacacaaaatggtatactgatatcactgaatttcatcttaataatgaaaagctttatttatcgcctattctagacggctgcggtggcgatatagtttcttatactatctccaaacatccagatatggatttagtaatgacaatgcttgacaaggcttttgccaaagaaacagctcttaataactgcatttttgatactgatcagggctgtcagtatcaaagccctcgttatcagcgagctttaaaactccatggtattactcaaagcatgtccagaaagagcaactccatggatgatgggctaatggagaacttctttggcctgctcaaaactgaaatgttctatgatcaagaatacaagtatcataatcttcaagaattaactcaagcaatcgaggaatatatcgaatactataacaacgaaaggataaagagcagattaaaaggcttaaccccgaaagagtatcgaagtcaagcctctattaatccaatattttaattgtctactttttacgtctcagtacagtgctttcgaggcttttcttttatattattttttcttagaaatagagtcacggatatttaattgactatggcaagtgatcgtaagtggaatttgaatatcttccgtaattagatctttagccaaacgaacggcagtcttgcccatttcttcagtattcatatagacactggatagggtaggagttaagaagcgattgatatctacatcatcaaaactaacaacagagatatcgtcagggatgttaacacctgcatcactaaaggctttataaacacctaatgccataggatcactaccgacaacaacagcagtaggacgttgttgcagttttaagatctcttttccagcttcaaaagcagagttagttgaccaatcagtaataaaagaatggcagtactggtcaagattgtggagtttcatccaggacaagtaagtgagttcacgtagatcatttttttcacaagcaatcttaccgtcaagatcaagaaccaatgattttccaccgatgtaaacaatgttcttgtgtcccaggttatagagggtatcaagaatatgagaagtttcttccacaaaatcattacgaacgatattacaattatgaatattggtgttgacgtcgataaaaattatatggggattaatgctttgaatctgcttaattgctacaggtgtcatttcaccctcgattagcactgcgccaaatttagctaagtcagcccaatttttattatcatcttctattctaaaaggttgctcaatacgtaaatgccatttcttggcttcttcattaatgcctttatgcagattgagaaaatagggatcggtgatttcacgagatttgttataacgcatgattagtgcaatcgagagctggttatcagtttgcttgggaccaggatgtttttgagatttcgaataatgcaggcgtttggcggtttcgataacgcgggcacgactagcctcattgattctaaaagttggatcattgtttaaaattcgtgatacgctagctggcgataccccagcaatacgtgcaatgtctctaatacttgccataaagatgctccttgtttgtttactgtttacattatacaacttttagcaagaaactggtgtataccgaacttgaggataatagtttagtgtccataaagtaagtcatattgaatcaatgttacttactttatggacactaaatttacttattttactacactacatagtaaagtgtagtaaaataagtaaaaaagcaattgaaaaagaagaatatggaaataataaaatcttaataatttgttcgcttgtttttatatttgtaattcattaaacttatgttcgaaataatgaaaggagaaatatatttttcaattgtaggtaatataattccatattcgtatattgacagtacttatgaaacaaaaatcattgattagtcaactagcaaaaatacataacggtacaattactcatcgtgaattagcattaaatggagtatcaagttatagtatttcgaaagctgttcaggatggtacgttagaaaaaatacgtccgggaatttatttatttggtgatgataccgaggatatattttatagtttgcaacaaaaatataaaaaaggaatctattctttagaaacagcattatatttatgggggttaagtgatcaatatccttttagcttagatatgacttttcctaggggctacaataatccaactttggatattgaaataaatccacatattcaaactaaaagtttggctactcagggaataactcaaactgaatcattcaatggaaatgtgattaatctctatactcctgaaagaactctagctgaaatattgcgaccgattaatgctgtagatatcgaaataattaccaatgccttcaagatgtggaataaggaaaagaaaaaagacataaatacattaatgtcttttgcagaaaagtttagggtaactagaaaggtaaatagctacttagaggtgttgttgtgaaaaattatgttgatgagaagcagttcaaagcagatgtaagaaggtatgctagagagcataatataaaaggaaatgagattggtcgattatggcaagaaattatgttagatgatttgctagaaagaatttcagtatcaaaatatcgagataatttcattttaaaaggtggttttttgttgtcggctattgttggtatcgataaaagatccacggaagacattgatgctgagataaaaggattagatttgaccgaaaaacaaatagctaaagtatttgaagaaatctgtcaaataaaattagcgggggatctattaagcatttcgttgtcagaaactgaacagattcatgagcatgaagagtacaagggctatcgattacattttaatgcttcttttcggaagataagatatccattaaaagtagatgtttcaacaggggatgttattacacctagggagattgaatatagctataaattacatttagaagatcgacatattaatatttgggcatatactatggaaactatagtagcggaaaaattagaaacggtaattacgagaggaatagctaatacacgtatgaaagatctctatgatttattcatactgcagagagaacgaatcaatttagctactttaaagtcagcttttgctaatactacgaattaccgtgaatcaatcttttggacaggacaagatatggattataagtattgtctaagacaagtagatattattgctgaaaatagtaatatgcagaatctttggaatagatacgtgagaaaacatccttttgctaagggaatcacttttactcaagttattcaggcagttcaaacttggctaactaaattagagtttgaaaaataatttcaatcaaaaatgacgctaattgatcgaaccagcgtcatttttttagataatagatgtagaaaatagtttgaaaaacgattagtttttatagaaatctttattatactttacttgtcttcgtagccctttgggtgactcttgtgccagttccaagcagttgcgataacgtcatcaacactttcatgctttggcttccagcccaaaatagttcttgctttggttgaatcagcaaccaaagagtcagggtcaccgccacgacgtggacccattgtgtaaggaatatcaatccctgttacttttttagcagcgttcaaaatttcaaggttggagtaaccttgagcagtacccaagttaaagacatctgacttattagtctccatcatatgtttcagtgccaaaatatgagcatcaattaaatcttcaacttgaacgtagtcacgaacgttggtaccgtccttagtgtcatagtcatcacaaaagatagtaaacttaccatccccagaaattgcactcttcaaaatatttggaatcaagtgtgtttctggtgcgtgatcttcacctattgtgccatcacttgcagcaccagcaacgttgaagtagcgaagagcagtgtacttaataccatcagctttgtcagcccaagccatgatcttttccatcatcatcttggtttcaccatatgggttgattggatcaagtggggtgtcttcggtgattggcaatttcttaggaataccataagttgcagcacttgaagagaagactaagtatttaacaccagcgtcattcatagcttgtaataatgaaatcatgccagtaacgttattgtcatagtacttaagtggctttttaactgactctggaactaatgaatatgctgcaaagtgcattacagcatcaatcttttcatcacgtaaaattttgcttaccaaaaaagtatcttcaatatcgccttggtaaaacttagccttaggatctacagcctttctgtgaccagtatataaagcatctaagacaacaacatcattgccttctttaactaattcgcgtacagcgtgtgagccgatataacccgcaccaccgacaactaaaactttcatgttttgcgctcctttattttagttattatcttttattgaaatcgattacattataacacatattttagtaaataatttacttattttagataaattatttaaaaacactaatttagtctaaatgaaaattcatgatcttgacttgggtcgatttgatattgatcttcaacatctgtaccccagctatcgatgccacctacaccgcgaacggcacctgcgattactaaaactgttctccgggcaagaggcaattcttcaatatgcgttgcattttctagttcttctgctgtgtagggaaggcaactgaagttgaatggcttatcagtttgctcaacggtgaggtcaaaatcctcattagaatgatcagcattgttgagcgtagtatttctagtgattttgagtttatgcgtttgcatgtgcatcccattttcctgtggcactaggtatttggttactggcaatcccttaattttaaaagagccagcactggctccagccatccgatcaggataagtctcaccagataagccttcatattcaaagccactagctagagttggtatgataaagcgcattccaattactggaagcggtggtaaatcttttttaccaaaataacgcatcttaattgtaacatgaccattattgttaatttggtaagtaatttcaacttttgtttttggaatagttaaagtttcataaataaaagtaatttcgactttacttgcgtactcatgattagaaaattggttgttgagcggagcgattggcaaatctgcaaaatcatgttgatcaactttgagctgaatttcagtacagtggctaaacatatcggcgccgagccattgagctgcttttaagttgaaaccgttgccgcgatcgttatcagtagttgcacgccaaaaggttggggtaggaacgcgataaaaccattctttacccttaatttttaaagactctaagccacctttttcatagctgaaaatatattgcttatctggggtattaatgcctaaagtagcatccccatagattatatgtaaattatttgtgtaagccatagtagtatttaacctcctgcattgctggttttggtgtacgatcggcgaacattaagccatcgcctgaaaattcataatcagagtgtcggtcgtcaaagtcgccgccataccgtaatacttcttggccactcaccggatcgtgtactaatagcgcttggtcgatgaagtcccaaataaagccgcctaaatattgtgggtattggtcaagcaatttaatgtaggaacccatgccaccatcagaattacccatatcatgcatatattcgcattctaaaaatggcttttgaggcttatttttaagatattcttcaacatcttttggtggtaaatacatccagctttcaagatcagaaatcttgtcctttaattctggcgtatgaaccacgccttcatagtgggtcaggcgactatgatcgtgtgctttataaaatttattcatagccgcaatgttttctccggcatatgattcattgccaagagaccagaagagaatggcggtatggttttttaaagtttcataattgttgcgggcacggtcaattacagcttcacgccattcaggaatagaaccgggaacattatctgaaggttcaacttgtcccatcttttgccaagtaccatgtgattcgagattattttcagccatgacatagattccattttgatcgcagagatagtaccacggaatctgattaggataatggcaagttctaaccgcattgatgttattttctttaaaagcatgtatatcttgtttcatatcagttaaagtgatgctgcggccacgcttcatattccattcatgccgattgaccccattaataattagacgttgaccatttaataaaacaaccttgtcagaattaatttcgatttttctaaagccgaattggtaaggaattagttcaagtaaatcaccattttcagcgtgaacttcaataattagttggtacaaatatgggtcatggttatcccaaagatgcacatttttgaataattctttttcaatttttatggttaagctgattggtgcttttttctcaagtagagttttgccattaatatcttctacgaacaagtgaactgagccagtatttttgcctgtaaagtgcaattgagcattaaagattccatcttggtaattatttgtaacttctggttttaaatcgagatcggttaaatgcgtctcaggtaggccgagcaattcaactgaacgaaaaatgccagaaaaacggaacatatcctggtcttccaagaaagaggcagtgctatgtttgaaaacttcaactgctaaaatattgtttttgtttttaatgtaaggtgttagatcaaattctgaaggagtgaaactatcttcggcgtaaccaacaaaatgaccattgagccaaacatacattgctcgctcaactccttcaaaaacaatgtgaacatcacgacctcgcaaagtggaatttaagtcaaaatgcttaatgtaagagccaactgtgttatctgcacctttgctaaaagagtcggtagctttttggttgattgtgtaagcaggtcgacgataaatttttccttcccacggaaagagcgtattaatatattgattttgagcgtaattatttagctcaatttcacttgggactggaatgtgatcaaatgatgaagaatcgaaatctgttttaaagaaatcaacgggtcgtgtttgtggattagctgaaaacttaaaacaccagtcaccatttaaactttgaacaaaactactagtttgcttttgccattcgcgatagttcttgaaatagggatgatcgctgtgggcaggaacttgattaacgcggaaaacttcggggtcatcaagccagctaagatttgctttcatgaaaatacctgatttctataaaaaaattaaccttgaaaacgcttatattataacacatagataataaatttacttaataagtaaattatttactgaaaaatattttgaagattaatatttttgactcgaaaacgaatgacaaagtgcttatgatatttattggaattacgtaaatattttgtataataaagttaaaaattatttatttaagatagaaaagatataaatatgacaacaattaaagaaatagcacaagaatcagggtattcttcagctacggtttcgcgcttattaaataatgatcctaatttgtcaattacggctgatactaagaacaagattttagaaattgccaataaattgggctattggaaggatcatcaggaaaagaagatccgtccaacaattgcgttactataccgagtaaatcatgaagagcaactgcaagatgaatattttacttcattaaagcaagcgctgatttcaacagtagaagcagagtcgctgcagatgaagactttttatgatgcagatgatttgattaaacatgcatcactttttcagggctttatcggagttggcgcggcgccaattgaaaatgcaacactaaaaaaactccatgaggttttgcctaatggggtctttgtcgatactaatccagccccggaattatttgattccattcgcccaaatttaacgctgacagtaaaaaatgcaattgatctttttcttgataaaggatatcagcgcattggttttataggtggcattgggcctaagcatgatcatattcaagaagtagatgtacgtgccaccgcttttgcggagtatatcaaggtgagaggcaaaagtgatgaattgatgtttgttaatggcccgtttagcgttgctaatggctataagttgggaaaagaggtactggctaaatgcaaaaataaattgcctgatgcatttttaattgcttcggatactttggcagttggagttttgcaagcttttaatgagaacaatgttaatgtgccaaaagatactgcaattttaagtattaataatagtaatgtggttaagtatgtttcaccgccactttcttcttataatattgatcaacaagagatgattgatatggcattaaatatgctaacgaatctgattattcaacctaatcgggcacacattgatgtaaatatgaatactaatttagttgtgcgcaagagttttgtgcctaagaagtaaattaattagtaaataaaaatattttttagtaatactatcaaaagagaatgctaatttaatgcgttctctttttgtttagctttcagtaaagaatttattaaatataaataaattctttacttaacaaaaatagagaatatactaaactgtgtaaacgattacaattaatgattgctttagggggcaaatttatgacacacagtgacaagtcagggaagcagattctttcctacgcatcattctgtttgggtaacttaggtcactcggctttttatggtgtgatgagtacatattttattatttttattactagcagcatgttcagcggacttaatcagtccgttgcagataagctgatcggcttaattacaggattgatggttgtaattagaattgctgaattggtaattgatcctattctaggaaatatagttgataatactaaaactagatggggcaaattcaaaccttggattttaattggtactttagtaagtgccgccttattattagttttgtttactggcatttttggattagcacaaaaaagttggattctctttgcgattttatttgtactaatttatatcagttttgatgtattttattcattatctgatgtttcttattggggcatggtaccagctttaagtgaagattcacatgcacgtggtatttatacttctttaggtgccttttcaggaacaattggttggaacggattaacaattattgttgttccattagttacagctgtgacttatgcggtaactggtaaacatgaggaaggtgcaccaggttggttagcatttgcggcagtaatttcagctttggcaattgtatgtgccttgattgtttgtttcggtactaaagaaaagcataatattattagaaactcagctaagcaaaagactagcttaggtcaagtgtttggagcaatttttcataatgaccaaattttatggccaagtttagcatacttgctttactcattagcatatgtaattaccaatggtgttttgttctatatgtataaattcgttattggtaagccaaatgacttctgggtagttggtgttattgcaacaattatcggtttctgtattagtccaatgttcccaattctgaacaaatacattccaagaaaatggttattcatcgctggacaaacttgcatggttttagcttatgttttgtttattttcggcagagacaacgtatttttgatggacttgggcttggttcttttaaacattaactttgctcaattggtaactgttttaacattaactgacgcaattgaatatggacaacttaagaatggtcaaagaaatgaagctgttgttttagctgttcggccgatgattgataagtttaccggtgcggtttctaatgctttagttggttatattgcaattgctgctgggatgaccggttctgcaactgctgcagacatgactgctcatgatattagcacctttaatatggtggcattatatatcccacttgctttggcagtcttatcaatcgtagtctttttgactaaggtaactttatctgaaaagaaacatgccgaagtggttgaagaattaaaagatcaacttgcagaaggtaagattgaaaagaatgaatctaatactcaagttagacctcaagatcagactatctatgctcctgcagacggtaagttaatgaagatggcagaagtaattgacgaagatggtaagccattcccaggaaagggttttgcaattaaaccagattcaggcaatatttatgctccatttgatggtgtagttaggttcacttttggtactaagcatgcttttgaaattgtttcaaataatggtttacaagtagttgttcatgtcggcttaggtacagttaacttgcgcggtgaaggttttgaaacttattatgatgatggtcaaaaggtaaaaaaaggtgacttgctgttagagtttgatcgtaatttagctcttaagaatggctatcaggacactgtagttaccttctatacacaaccaggacgaattgtaaaatctagtgaaattgaagctggtaagattgttgagcatggtgaaaaagtattagatgtacaatttaagtagaggaattacaatgacacagttaaaacgttttttatatggtggggactataacccagatcaatggccagaagacacttggtcagaagatattaaagtttttaaaaaagcggatttaaattctgctacaattaatgttttttcttggagtttgcttgagtcaagagaaggccaatatgatttttcaaaattagatagaattattcaagaattgtctgatgcaaattttgatattgtacttgctacttctactgctgcgatgccagcttggatgtttaaaaaataccctgacgtagcgcgagttgattatcaaggacggcggcatgtctttggcgcacgacataacttttgccccaatagtaagaattatcaagttttagctagtaaattagtcgagaaaattgccgaaagatatagtaataaacctcatattgctgtttggcatgtgaataatgaatatggcggcaattgctactgtgaaaattgtcaaaatgcttttcgtacttggctcaagagtaaatatcaaacactagataacctgaatgaggcctggaatatgaatgtgtggagccatactattcatgattgggatcagattgttgttcctaatgagttaggagacgcctggggaccagaaggtagcgaaaccattgttgccggtttatcaattgattatttacgttttcaatctgatagtttacaaaatctttttcagatggaaaaatcaattattaaaaagtatgatactaacactcctgtaactactaatttccatggtttaccaaataagatggttgattatcaaaaatgggctaaagatcaagatattatttcttatgattcttacccaacctacgatgcacctaagtatttaccagcatttttgtatgacttaatgcgtagtttaaagcatcagccatttatgttgatggaatctgcaccgtctcaagtcaattggcaaccatatagcccgctgaaaagaccagggcagatggcagccacggaattgcaagcagttgctcatggtgcagatacggttcagtttttccaattaaaacaagcagtaggcggctcagaaaagttccatagtgccgtaattgcccactcacaaagaaccgacacgagggtctttcatgaactagaagatttgggtaaaaaattaaaaaagattggcccaactgttttaggctctaaaactaaggctagagctgctattgtatttgattgggataacttctggtcatatgagtacgttgacggtattagtcaagattttaattatatggaatcaatcttagattattatcgccaattttatgaacgcaatattccgacagatgtaattagtgtcgatgatgattttagtcaatatgatttagtagttgctcctgttttatatatggttaaagcagggctaagcaaaaaaattaatgcttatgtcaaaaatggtggcaactttgtcactacctatatgtctggaatggttaacaatagtgataatgtctatcttggtggctatcctggcccgttaaaagacgttatgggtatttgggttgaagaaagtgatgcaattgtaccaggacataagacaattgtttcactaaatggcaaggattataaagcgggtttggtttgtgacttgattcatccagaaaatgcaaaagttttagcaaagtactccaatgagttttatgcaggaacggctgcagtcacggaaaataaatatggtcaaggtaaggcctggtatgttggtactaagttggatcacattgggttgacgcagctattcaaccatattgttttgacagctaacgttgaatcattggtgggcgacagtcataagttagaagttactaagcgagttactcagtctgggcaagaattatactttgttttaaatatgagtaatgaagaaagaaaattgccacaaaaatttgtagagtatcaaaatattttaactggtcagcaagctcatgatcaaatgaaggcatgggatgtacaaatacttgttaaataaatgattttttccttaatgaagacaagaagttagacaaacgatctagcttcttgttttttacttaaataaatattttatttatttaagtaaactatttactaaaagatactgaagagatatactaataactgaaaacgattacagaataaatttgaggtaaaaacaatgaataaggaagaattacttaaagaatatgagacaacttttggtgaaaaaggtaaggatgtctttttctcacctggtcgaatcaacgtgatcggtgaacacactgactacaatggtggtcatgttttcccagctgcaattagtttgggtgtttatggtgtttacggcccaagagaggataaaaaagtttgcttgttttctggcaatgttgatggcgatatcgtggaattcgatattgacgacacaactgttgagaaagatgatcgcttttgggctaactacttcaagggcatgattacgtacttacgtgaaaaatatgacaacattgatcatggttttaatctttatatcaaagccaatttaccatcaggttcagggctatcatcaagtgctgccattgaaatgctaatgggcatcattttaaaggatgaatttaacttagatgttgaccggattgctttagccaagatgggtcaaagaacagagaatgaatttgttggcttgaattcagggattatggatcaatttgcctgcattatgggtaaaaaagatagtgctatcttcctcgattgcaatacattagattatgagtataagccactcgctttaggcgattacgaaattattattatggcaactaacaagccacataccttagccgattctgcttataatgatcgtgttcgtgaatgtcatgatgcagtgaagaagttgcaggctaagttagatattaagactttaggtgagcttgataatgatacttttgatgaatatgcatatctgattaataatgaaactgaaattaagcgtgctcgtcatgctgttagtgaaaaccaaagaactttgcgggcaacaaaggccatgcaagatggagatttggaaaaattgggacgtttgattgatgcttcacacgtttcacttcattacgattatgaagtaactggtcaagaactagatactttagctgaagcttcatgggctcaacctggcgtcttgggtgcaagaatgattggcggtggcttcggtggtagtgccattgcaatcgtcaagaaagaccaagctgaggcatttaagaaaaatgttggcaagatttaccgcgacaagatcggttacgatgccagcttctatgatgcggaaattgttgatggaactaagagaatttaatcaaacaagaggataagtatgaaagttattgaaaaatttgcggatgaagttattaatagtggagcgtatgagccgctcgatcgcgtatatgtgattaacaaaattcgcgctttagttggcgatgaggcaagtagcgttgaagctaatgatgaacaaacttcagttaagcaattagttgatttagccgtgcaaaataaaaagatttcggatgatgttacttcacgtgaagttttgaatgatcaactatacgacttgataacgccaacaccatctaaaactaatggcatcttttggcaaaaaatgcaaaaatcacctgaaaaagcaacagattggttttataaactttgcgaaaacaacaattatgtcaaaaaggaagcaattgccaaaaatgttgtattctcagggaccagctctaaaggacatggcttagaaattacaattaatttgtctaaaccggaaaaggatcctaaggcaattgcggcagcagctcatgcaactggtaagaaatatcctcaatgtgcactttgcctagaaaacgagggttaccttggtggatatggcaaaaatgctcgttcaaatttgagaattattcgcatgaatattggtggccgcccttggggatttcagtattcaccatatgcttacttcaatgaacattgtattttcttagatcaaaagcatattccaatggtcatcaaccaacaaactttgattaatttggttgaaattgaaaagacgttaccacattattttgttggttcaaatgctgacttgccaattgttggtgggtcaatgttagcacatgaacactatcaaggcggacgtcatacttttccaatgatgaaagctaagattaagaaaaatgtagtctttgatgattatcctgaagtggttgctggcattgtcgattggccaatgagcgacttgcgcttgattagcgataattcgttagatttgattgaattgggcgctaaaattattaatttctgggatcattattcagattctgctcgtcaaattaaggcttttgatggtaaaacacgtcatcatactgtgactccaattatgcaccgtgaaggcaagaacttcgtacttgatctagttttgcgtgacaacaacactagtgaaaattatccgttaggtattttccacccacataaagaattgtggcatattaaaaaggaaaatattggcttgatcgaagtaatgggccgtgctattttgccaggtcggttaaagagtgaacttgaagaagttaaaaaatactggttgggccaagataataagatggctattagccacaaagaatgggccgatcaaattaaagcagagcagaatattactgccgagaatgttgacgctgtgatgcagcaagctttagttgaagtctttgaacaagtattgcaagatgccggtgttttcaagaataatgcagatggcgatgaaggctgggataagttcattaccgctttaactaggcagatttaactcatcaatgtgtaaaacgagatctgttggatctcgtttttttgttagcggtaactcatatattctgatggttaaataatttataatatttatgaaagcgaatacaaaagagaaactgtcaaatcttttgtgtaaatagatctttctcgtaaattgattttttaattatttatttaatcaaagtaggattctaaggtgtcctgaacctgaccaaagcctttatgaattcgattgaaataacggtcattgtagctcattgcctgaatgccaataaaagcatcaagcgactgttcagttggaaactctgccttaggcttagctttgcgcttgatcacattgttaaatgattcaatcatgttagtcgaataaattgaagctctgatctgcttgggatagttataaaagaccagcagatctggttctatgtctttcaagcttctgataacatggctgtaaaccttgccccatttggtatagaagtcatgcaggacagctgtggcttcttctttgtttgtctgttgatgcacctgtttgaattcgttcatgatcttttcacgatcgtcgacgcgtactttagcgcagatattgcgcatgacatgaaccaaacagcgttgaaaatgagctttaggataagtcctggccaaggctgttttcatgccaacaacaccatcagaaagaaaaagctcaacttgctttaagcctcgggatttcatgttttgaagcatatctgtccagacttcaatgttctcgctaggtgcaatgcagtagtcaatgacctccttgtgcccattaggcttgatgccaatggcaatatagactgcttcacgctcaaatgtttctcggcgcaaaggaaggtatgtcgcatccaaatagacgcagaaaaacttgtcgcttagcttgcgtttgtggtaagcctcaacctttggaatcatctgcttggaaatatttgatacctgagctggactgtaatggctgccatacatcttttcaattagatcggctatttccctggtggtcacgcccttggagtaaagcttgataatcatgctttccaagatatccgagtgctgcttgtagtcaggcagcgtgtgctgatgaaattgaccgttgcgatcccaaggcacttgcacttcaattgggccaaattgcgtatcaactttgcggaaataagcaccatttctagagttgccagtattccagccatttctggcatagggatcatagcccagaaaggcagtcaattcagcttctaacaagttattaacagcctgttgtagctctttgcgcaataaatcatttattttgtctggattgaatagagcttgagcaaaatctttggtaaaatcattcatgaaggagttcttctttctgtatgtgtttttttgttcaaaccaatcatacgagaaaggaactcctttttctaatgtttaaagaaataaatttaaggaatcattcatccttacacaaactattttacagtctcacaaaagaagggcaagagtatgaagacaagttttagaaaatatggcagaaaagataataaagatctttgtgaaatcacactagagaatgatcacggtatggtagttaaggtattgaactatggtgctacattggaaaaggtgttgcttgatggtgagaatatgattttgtcactggataagccagaagattacgacaaggagcgtaattatctaggcggtacggttggacgtattgccggaagagtgagacgaggtttatggcggcacggcttagaattacatcaattaccaatcaatgaagggcctaaccacattcatggtggtattgggactgatactgaaatttgggattttagacctagttgtaatgaaaaaggtgctcgtgttgatttaacactttttgatccagatgggcataatgattatcctggtaatttaaaattacacgctcgttatgagttagataataacaatattctgcattattcattgggtgccatgagtgataagctgactatttttaatccggttaaccatactttcttcactttaggtgaaaagaaaatgattaatgacttgcaactgcaaatgaatgctgattattatattccagttgatgagactggcttgcctgatcgtggtatggaaaaagttgatggaacagcattcgattttagaaagaagaagcgagttggggatgcattggaagctgatgatccgcaaattaagaaccgcgatggaatggatcatccatttatcctggatggcaatatgccaaatgcagtgctaacttctgctaaacacaagttaacggtaacgactaatgctccatccttgattctttatacaggaaatggatttgatcatactggtaaatatacggctgattttggtccatattgtgggattacgtttgaagctcaagtgccgccagcagaaggtgatgatttgggacgcatcacgcttttgccaggtgaaaaatttaagcggactgttgattggaaatttgaataaaaatatggagaacatccttactgaatgaagtggtagggatgtttccttcttttggatattatgatttgattttacaagtaaatctatattaatatttaaaatatttagaaatcaactgaaaggtatagtaaaaatgatgacaaacgaaaagattattgctttagtcaaggaagaatatctaaacaagattccaaaaatttttcgcaagcatgctgttgaaggcacttgcaagttaatcgctagagaacatcccgatttatacaaggcttttgaagatggtgaaccaaccgcagaagaaaaacaacaaatgacagagttgattaacgggattttcgaacaaagaatgaaaaagcataagatgttataaaaagacgctggaatgtaatgattattagatcgctacattctagcgtttttttgattttaattttgatttattaaactaacaggtagcgtataaacactttctaatgaaacagagggatcattaatttgacgtaaaagtaaatcgcacattaattcagcaatttcttttgtatgttgccgagcgctaattaaatttggaaaaagactttgaatcaaatgactaccatcaaatcctgtgattaaaggtacttttcctaaataatcagcacattctttagctagtaaagctgtaatgtcatcggtacaacaaattgcatcatattcgtcatcctttaaaaattgaaggatggctatttttttagcaataattgagtcactggcactgagtgagcgaagatcgaatttagaatcaaaagtgttaaatacgcgaatcattcctttgattcgatcacttattgggtaatagtcttctttagcaccagcaataataataattttctttttcttttgttttagaacagattgtgcgatttgcatacctgcgtcatagttattagattgaacagttggtatttgaggactaattttacggtcaaagctaacaataggaaactttatttttagtccttttttaggaatcttaataggagagctggtgatcagtccagcgatttccttttgtttaaatcgctctaaatagtaattaatatcttgggattgatagtgatctagatgaagaatacaatcgtatcctttttcctgtaaataaaaggctagatattcaaataattcagaataaaaaggattattaatttttggaaaatcaacctcgattaaatttaatttagatacagagttgacggtaccttttactttatatcctaatttttttattgcttctttaaccttaagagcagattcaatacctacatatccattttgattaatatatcttgaaactgttgctatcgaaacgtttgcttctttagctatatctttaatagtaactaccatattttttcacttccttatgtaaatattacacatttaaaatcctatatcatagtattttgacttatttaaatgtgtaaatttgtgtaaatccattgaaaactgtaaatagaagtgtatgatgtaattgtaaatatgatagcgcttacttaaatagagcgatatttgatcaagaggagtgaaaatttatgaaaaagtggctaaaaagaatagctttaattagcttagtcgctacgatggctttaagtttgacagcttgtggtcaaaataaaagcagcaattctggtaaaaaagtgacaattgagtactttaaccagaaaaaagaaatgtcagcaactttgaaagaaattatcaaagactttgaaaagaaaaatcctgatattcatgttaaagaagttgacgttcctaatgcaggtacggttttgaagacaagaatgctttcaggagatgttcctgatgtaattaatatttacccacaaaatattgattttcaggaatgggcaaaagcaggttattttgaagatatgactcatgcttcatatattaaaaacattaaaaatcactatgctgattcttttaaaattaacggtaagatttacaacgcactacttagtgccaacgtttacggtttcttctataatgcaactgaatttaagagattaggaattaaagctcctaagacttgggccaaatttgaacaaattgttaaaaaaatcaaggctagtggcaaggcaccatttgctgtagctggtactgaaccttggactttaaacggatatcaccaattatctttagctactgttacaggtggtgctaagcaagctaaccaattacttaggttctcagcgcctaacggcattaaagtaaacaatccttatattcaaaaagattttactagattgaacttacttcgtgaaaatgcacaacaaaattggcgtggtgctagttacaacgatgctgttgtttcatttgctaatggtaaaagcttgattatgccaaacggttcatgggcattacctatgatcaatcaacaaaagccaaaatttaaggttagaacatttgcttttccagcagcaaaggctggtcatgaaatgacagttggttcaggcgacttagctttgtctatttcatcaaagagtaagcacaaaaaggcagcagaaaagtttgtagcatatatgacaacacctgctgcaatgcaaaagtactataacgttgatggaagtcctgtagccgttaaaggtgtaaagcaaaggggaattaattctcaattgggaggcttgtctactttggctttcactaaacacgatatggtttggttagcacaagactggactagtgagaatgatttcttcaatttgacggctagttacctgatgactggtaataagcaacaaatggtaaatgatatgaacaccttcttcaatccaatgaaggcttctaactaggaggattaaaaaatgaaatcaaaaagttttattgaaaaacattggggttggttgtttttaatcgttccattgattttacaagcaattttcttctattttccactatttcaaggtgctttttacagttttactaattggactggtttgacttataactacaagtttgtaggaattaataactataaattattgttgatggatcaaaactttgctaaatccattggttttactgcaattctaactatttcattgattattggtgaaattgtaataggtattttagtagctagagcattaaactcaaagatcaagggtcaaacattctttagagcctggttcttcttcccagctgtattgtcaggtttgacagttgctttgatttttaagcaagtattcaattatggtttgccagcaattggtaatgcacttcatattgaatggcttcaaacaagtttattaggtactaatactggtgcggtaattgcaactattttcgttttgctttggcaaggtgtggcaatgccaatcattatctttttagcgggtttacaaagtattcccgatgaaattaaagaagctgcggagatggacggtgctaatagtcgtcaaatcttctggaacattgaattgccatacatgttaccaagtatttcaatggtctttattttggcattaaagtcaggtttgacagccttcgatcaaatctttgcaatgactgcgggtggtcctaacaactcaactacttcacttggtttgctggtttataactatgcgtttaacaataactcatttggttacgccaatgcgattgccattgtcttgttcatcttaattgctattgtttcattcattcaaattaagatttctaacaagtatgccgttgattaaagaggagtatcaaaatggaaaaagaaaataaatcaaagaagttttgggattatgctttactgattgtcggtggaattctgattttaattccattgctctatacatttttaagttcatttaagacaactaagcaaattatgaatcatttctttgcttggccaaatccatggacatcagttaactttcaaagattgtttgcggatggagtaatgggttacttctggaactcaattgtcattacggttttatcaattgtcttagtaatgattttcgtcccaatggctgcttactctattgctagaaatatgtcaaaacatacagcctttaattggatgtatatcttgctaatcattggtatcttcgtaccattccaagtaattatgattccaattactgtcatgatgagtaaaattggcttagctaatatgtggggcttgattattctgtatttaacttatgcagttccacaaacattgttcctttatgtaagctatatcaaacagagtgttcctgaaagtttggatgaagcagcagaaattgacggtgctaataagattaccgcatatttcaagattatcttcccattattaaaaccaatgcatgcaacaacattaatcattaatgcaatgtggttctggaatgactttatgcttccactgttaatcttgaacaaagattcaaagatgtggacattgccattgttccaatacaactatacaggccagtatttcaacgattacggtccaagttttgcttcatatgtagtaggtatcatcacaattacaattgtttacttaattttccaaaagaatattattgccggtatgagtaacggtgctgtgaagtagttaagaatagagacgaggttttaacaatggttaaggtagatttagatcacgtatataaaaagtatgatggtaatgataagtattcagtaacggactttaatttacatattaaagacgatgaatttatcgtttttgttgggccatctgggtgtggtaaatcaactactttaagaatgattgctggactagaggatatttcaaagggtactttgaaaattggtggtaaagttatgaacgatgttgctccaaagaaccgtgacattgcaatggtattccagaactatgctttgtatcctcacatgtctgtttatgacaacatggcctttggtttgaagttgcgtaagtatagcaaggaagatattgataagcgagtacaacgtgctgcaaagatcttgggcttgacagattacttaaagcgtaagccatcagcactttctggtggtcaacgtcagcgtgttgctttgggacgtgcgattgtgcgggatgctccaatctttttaatggacgaacctttgtcaaacttggatgctaagcttcgtgtaacaatgcgtgccgagattgctaaactacaccaacaattgaagacaactactatttatgtaactcacgatcaaactgaagctatgaccttagctgatagaattgtcattattaaggatggtaagcaacaacaagttggtagtccacttgaagtatataacaaaccagctaatgtctttgttgctggttttatcggttcgcctgctatgaacttcttccatgtaattttaaaggatggcaagatcattgataaagataatcatgacttcgaaattccagttccagaaggtaagttaaaggcattaaaagaaaaaggatatgacggaaaagagttgatctttggtatacgtccagaagatgttcatactgagcaagtatttttagaaacctatccagacaatgttgttgaagctaaagtggtagtttcagaattgttaggtgctgaaactcagctttatactaaagttggtaatactgaattggtatcgaaggtagaccaaagagactatgctaagcctggcaatatggtaaagatgggctttgaaatgaataaggcgcacttctttgatcctgaaactgaagtagcagttgagaactgaggttaagtaatgactaaaaacttaattacatttgatgaaaaaaataaagtttttcatttgcataatgaccaaatttcatatctgatttcaattgaagatggtggcacactaagtcacttgtatttcggtaaaagtatcaaagcatatcatggtgaattgcggtacccacgacttgatcgaggcttttcaggtaatttacccggatcattagatcgtactttttcaaaagattctttgccacaagaatacagtagtgcaggcgaaatggactttagaacgccagcaatgattgtgcgccaaccagacggttctaatgcagtatttttaacctatgaaaattatcaaattgtgccaggaaagcctgaactaaaaggtttgcctcatgcatgggtaaagaataaggatgaagctgaaactttaatcattactttaaaagataagtttagtgagctgagatttgacttgctttatacaatttatcgtgatcgttcggtaattgtgcgttcgactaaagttagaaatgctggcaaggaaacggtaaaaattgaaaaagtagcttcgatgcaaatggatttcgtagatcgtgactttgacatgattacactgccaggtgcccatgcgcatgaaagacgggttgaacgaaacaaggttaatcaaggaattcatgtttattccagtattcgtgggacatcaagccatcagatgaatccatttgtagcgttggctgatccagatacaaatgagtttgatggggatgcatatggtttcgcctttgtttactctggcaatcacaagtttgaagtagaaaaagatccgtatgcgcaaaccaggattgttgttggcattaatgattacaactttagctggatgctaaatgcgcaagagagtttccaaacacctgaagtattaatggtttattccgatcaaggtttgaataagatgagccaagctttccatagtatcattcatgatcgcattatgcgaagcaaatacaaagatcaggttcggccaattgtggtgaataactgggaagcaacttacttcgattttgatgaagataagttaaagccaattgttgataaggctaaggaattaggcattgagatgtttgtgcttgatgatggttggtttggccatcgcgatgatgataattcttccttgggcgattggcaggtctttgagaaaaaattccctcatggcctagatcactttgccaattacgttcatcagcaagggcttaagtttggtttgtggtttgaaccagagatgatctcaattgattctaatttgtatcaaaagcatcccgattatttgatgcatgttcctggaagaacaccaagtccagctcgtaaccaatacttgcttgatttaggccgagcagaagtacgtaataatatttttgaccaaatgaaagcaattcttgactcaggcaagattgactacattaagtgggatatgaatcgccacttgtctgatatttaccaagctgatttgccagcagatcgacaaggcgaagtctatcaccgttatgtattaggtctatatgatttacttgaaaaaattgttgatcgttatcctgacctcttaattgaaggctgctcaggtggtggtgggcgttttgatgcaggcatggcctattacaacccacaaatctgggctagtgatgatagtgatgcaattgatcgcttaagcattcaatatggcactagtttagtctatccacaatcaatgatgacttcgcacgtttcggttagtcctaatgagcaaaatggccggattacgccgtttaagacgcgtggtattgtcgcaatgtggggggatttaggttacgagcttgatttaactaaattaagcgaatcagatcaaaaggctgttgctgagcaagtagctgaatataagaaaattagagcagttactcaatatggtactttttatcgcttgaaaaatgcgcaagaaggcaaccaatgtgcatgggaaactgtttctcctgataaaaacgaagtagttttatcaacagttaaggtcatggccagtgcacagccatactttactaaaacaaaattagttggtcttgacccgaataagcagtatgaagatcaggcaagccaccaagtatatggcggtgatgaattgatgaacctaggaatttatgatccggttgaacatggcgatttcatggcttatcggtatcactttaaagcaattaactgaggaaatttgtgatggcaattaagaacaaagtaatgttgattacttatcctgatagtttaggtaagaatctaaaagaattaaacgaagttttacataaagacttaaaaggcgcagttggtggcatccacttattgccattttttccatcaactggtgatcgtggctttgcgccaactgactacactactgtagatcctaagtttggcgattgggctgatgtcgaaaaattaggtgaagaatattacctgatgtttgactttatgattaatcatatttctcgtcattctaagtattatcaagattttcaaaaaaataaggatcaaagcccttatgctgatttattcctaagctgggacaagttttggcctgaaggccgtcctactcaagctgatgttgatttaatttataagcgtaaggaccgtgcgccttatcaggaaataacctttgccgatggtaccaaagagaagttatggaacacttttggacctgaacaaattgatttggatgttcgtcaaaaagtaactcaaaagtttatcaaagatactttaactagtttagtccaacatggcgcagacattattcgcttagatgcctttgcttatgcggttaagaagctagatacaaacgacttctttgtcgagccagaaatttgggatctacttaaagaggtgcaagctgatttggctggcgagggtgcaaccattttaccggaaattcatgagcattattcaatgccattcaagattgctaagcatggctactttatctatgattttgccttgccaatggtaactttgtattcactgtattctggcaagagcaatagtcttgccgcctggcttaagaaatgcccgatgaagcagtttactacgttggatacgcatgatgggattggtgtagttgatgctcgtgatattctctcccctgaagaaatcgactataccagtcaagagttatatgaagtcggcgctaatgtgaaaaagaagtattcaagtgctgagtatcataaccttgatatctatcaaattaatactactttttattctgctttaggcgatgatgatcagaaatacttcatggcgcggttattgcaagtctttgcgccagggatcccgcaagtttattatgtagggatgctggctggcaagaatgaccttgaattactggaaaaaactaaagaaggtcgcaacatcaaccggcattattacagccgtaaagaagtggctgaggaagttaagcgtccggtcgttagttcgctcttaaaattatttacgtttagaaacaatgaacctgcctttgatcttgatggttcaattgaagtctccactcctaatgaaaatgaaatccaaattattcgtaaaaataaagagcaaaccagccaagccgaattaaaagctaatttaaaagatttaacttataaagttgtagttaacggtcaagaagttaaattttgatcttttccccctctagatgaaaaattaaacaatattaatataaataagcaaccttgctcaattttagtaatggttgcttattttagtttcttgtgacttatcacaaaatatattagctttattcaaataaaaatcaaataatcttgttatgattaaaaagggaagaagggataaacgttgaatatttatgggaaatacgccccaactttagataaattacttgatcaaatgatgacgcaatttgagcagttaaataaaaattatgaaaaaggacatggagaacgtctctatgaacatttacgtggtcgggtaaaaagtgaagccagtatggaaggcaagtgcaaaagaaaagatttaccgttaacgccacaatcagctttgcgtgctaatcgagatagtgttggattgcgtgttgtctgcaattttattgacgatatttatacctgtattgactttattaagcagtgggataatgttaatgtttatcaggaaaaagattatattactaatgctaaaactaatgggtatcgttcatatcatatgatttttgacgtgactgtacctgatgaagatgttgacggcaatataccgggtcattattttgttgaagtgcaattaagaacaattgcgatggatacttgggctagcctggaacatgacatgaaatataaacaccagattaagaatcctgagatgattggcaatgaattaaagcgagtagcagatgaattagcttcttgtgatgtgtcgatgcaaacgattcggcagttaattagggaagaggattaatgagttaatgaagattttagtagcagaagataaaccgcaactattgcgggttttaacagtggccatggaacacgcgggttatgatgtggatccggtagataatggcttaaaggcagtcgagcatgctaaagaaaattcttatgacgtaattatgctggatatcatgatgtcagtcatggatggaattacggctttgaaaaaattcgtgaaagtggcgataagacttatattttaatgttgacagctaaggccgaggttgatgaccgagtaactggtcttgatagtggtgctgatgattatctgactaagccattttcacttaaggaattgttagcgcggctgcgttcaaaagagcgccgtgaagatgactttactcctaataagttggaattaggggatgtaactttgaatgtgactaagcaggagttggctagtcataattcaattcgtttgagcgggactgaaactcaattgatgaattactttttgttaaatcaaaataaggaattatcaacagaagagttgcttaatcatgtttggaaaaatgatcttgatgccaatagcgaggtagtctggatctatgtttcatacttgcggcaaaaattgcaatcaattcaaagctcagttcgaattgaaggcgataaaggtggttcatataagctagttaagtaggtgagcagatgattcaaaaatttcggtggaagtttattggtacttctgttgctgccttgtttgtagttttgttgttgacgttaggcggcttagtttgggtgactcatgttcaaagccaaaatgaagtcgatcgcgtgctaacggctttggtcaaaaatgaagggcgtttgtcaccaaaaaatgccaaaccagcctttggcgatcaacatgatccaattaatcgcaattttttaggtgggcagtataatcccgaagcggtttatcagtatcgctattttgcggtaacaattgatgaaagccatcaggtacatgtaattaatgataataacgtttataaaattaataattccaagatacagactattaccagatcagctttagaaaatggtgataaaagtggtgtagttgccttaggacaaaatcaatatgcctttagggttgtaaaaaattctactggtgaaatgatgattgtttttttgaatgaaactctgatttttaaccgtttttggttattatttagagtagcgttagttttaggcttaggcgctttgattgtctttgctttagttttgattttagtttcgggcaaggcaattaagccaacgattgatgcttatcacaagcagcaggaatttattaccaatgccggtcatgaattaaaaacgccactagcagttatttccgcgaatacggaaatggaagaaatgctgggcaataattctgaatggaatgaaagcaataaagagcaggtggctaaactaactaagttaatcaatcggttgatttcgctggctcgagctggcgagacgggtgagcttaccttaagcaaagttagcttttcagaaatcgttgaagaaacgactaaagattttaaatcagtcatgaagaagaatgacttagtctaccaagtatcggtgcgggaaggcttaaatgttttagctgaaaagcatactttagccgaagtagttaatattttgctagataatgcgcaaaaatattgtgatcctcatggcaagattcaggtgaaactgactaagggcggaactttaagcaaatatgcggtcttgcgggtagaaaatacctatcgtgaaggtaaaggcaaagattacagccatttctttgatcgtttttatcgcgatgatgagtcgcataattctaagaaaggtggctttgggattggcctggctatggcgcaagagttagtcgaagcctttcatggcaaaattttagcccaccacaaaggtgaagacattgtttttactgttagtttaaaaattgctaaatgatcattctgtgatagttgtataattagagcagaattgggggatcattttggcgaagagaaaatcaatttataccaaagatgttgtcctagttatggcagcatctttcttttttatgtttagtacaatgtttgttaatcctttgatcaatggctatgccaaagaattaggcgctagcagtgcttttgcgggaatcattgttgggattatgagcttagccgccatgtttttgcggccggtagccggtaatttgactgataaattttctaaataccgcttatcatttattggcggcgttttgatttttatcggagtcatggggtatgttttgactctatcaagtggctggcttttgctttttcggctgattaacggtactggttatgtcctttgcacagtttgtatgactacttggctagcctttttagtgccgcgccaacacgttggtgaagcaatgggcttttatggcttaatgaatgctttggcaatggcgttagcaccagcagtttcaattaatatttatcaaaaaataggttatcgcacaagcttgctagcatcagctgtttctgctttattaatgattgtggccattcagtttgtgggtgatcatgctttgcctaaaaagcgagttcgaacgcagaagaagagtttcaaaattatccagtttaatgttttaccggtagcaattttgacaactttatttgctatcccgtattttgtaacacaggcagatattgtaacttatgtagaacaaaaacatctgactgtcgcagttgggtcatatttcttgatctatgcggttgttttgttgattattagagtaggactaaaaaggtattttgatacagtacgttttggcgtctggttttggctaagtctagtttcaacggctgcttatattatcttgctcgcaataatgaataatgattggcaaatggctttagcggcagctttaatggcatcaggctatgggatcatttattcagttttgcaatcaactgcgctgttgttagcaccgattgaagaacaaggcttagctagtgctaccttttatttgggactagacattgcgatggcctttggcccaatgatcagtggtgtaattgattctgctttaccgatagaatggttctatccagtagaattagtcttagttccattgattttagtagtttatttcatttggcgtaagcgtttgaatggcgcaattgaccatcattagagggaaaatatgagcgaatatgtagttaaatctaagttagaagataaagaatggcaaattgccaaccaagtacgtgatcatgtttttgtttgtgatgatgttaaacatgatgcaggtcccaacccagttgagtatctatgtagtagtgttaattcatgtattgtaatgtcggcagggatgattactaaagcacatcaacttgatgttaaaaattttagggtagaaaaccaggcaaaaacggagaatctcggtcatggtaaatcagtagtaactgagatgaagatcaaggtcttctttgattcggcaatgactagagccgagaaggaagaatttttagctcatactttgcatgtttcaactgtttatcaaactattaaagcagctgtcaaaatttatgtggaattaggaaaataagcgatgagcgagccatattacaaacaagaataccagggtgaaagaaagttagatggtgaggccccagtttttagttttgatcaaattatgaaagaaacttttctgcgaccatttatctggaatgcaagaactaccagaagaagtttctggattggaatcgttattactgaagttataatttggattggtggaattattacatttttggcaactgttatgccagtttctcactatgagaatgattcagctgatatgataaatggttttgcttttaatggtgatcacgcttcgatgattgtcattatcggtatgattatttggggcttgatctatctttatttgaaattatgccaattaggcctagccgtaagaagattgcatgatatcaattatacaggttggtggattctgttaatgctgataccgttaggttggatttttgttctgtattttgcaattcagccaagtaaacaagagccggtgaaatggggaacgtatctttaccttgacgaataataaaaaatgttataatttaactataagagattacgttaggagattatatcgatgaaaactaagaatttatttacttcattagctgccgcagtgatgctttcagctggtttagctggtgcaggtgtgtctgctgcagaaccagttcatgcagcaactacacaaacttcaagcaaaaaaggtaccattagtattaagcgtagatcagtatcagctacagttaataatgctaatcctaagctttacgctgtaaaccaagatggtaaaatcgtaaagtcaatggattcaaattatactaaaggtcaaaccatccagctttacttttctaacgaggctaagaacgatcaaggttctgttactttctattatgttgacagtcaaactgtagatggacaacaatgtgcaatttatgttgtttcgactgatgttaccccttcagcaacagttccaagtcaagcagactggtcaaagcaagcacaaagtgacaaaaaagccattcaagatgcttacaacaatagagcattaaagtacatcgttgtttcacctaagtcaaaaaagggtgcaaagatctactacgcatataagaagagtgctaaggctaaaaaggtttactttaaggcaaccaagaagaagatcaagtacggtaagaagtacaagtcatcgatgatcgttaaaaacggtaagagcagatatgcttatattggtaagaagagatacttaaagacctctactattaaagtagtaagtgttaagtacgcaccagttcaattatcagatgatttgaagaacttaattgttcaaaactagaaaaagttaataaaaattgtagcgtaaaggatgaattattgtcctttacgcttttttgatctaaaaattaataataataatattgataaaaaatctcactgacctacaatagactttgcgttatttttagggagttgtaaaaataagaatgaagagagtaaaagtctatttaggattagcttgtttgatgacgttattatgtttgaagccgcaagtggtttgggctcgagaactaaatccatttcagactaagatgattaatccgcatacgtcttatagaatttatcaaaacttaactcgtaaaggtccgtcaagaagtctatgccttgctaatacgtttaaacatggcaatgttcaagccagtgcagttagaaaagttcgcggcaataagtattgctatgtttggttagacggacatagaggcggttgggtcaatcagcgagcttttttaagaagaaaaattgcagttgtacatcagattagtttagtgaagaattcgcattatagttttccaactagggatgcgattaattatgcaacagatgcagcaggaacggtaattgagccaagtaaagttaaagtatctcgagcagaagtttcatcaagtaaaaaggaaagctatcgggtaagttattcttatggtaaagctcatgctcagacagttgttcaagtgagagctaatgctagagagggcattgttaaagcaaccaaaaaaaccacaagctggagacagtgctcgtagctggttcaagcactataagacgtctggtaattggggtagaagctttgctccggaaactagaccgcatgttttgaaaagtggacattttagactgaaaacctatttctatcaacctgcgactttatgtcaaagtgattcggtaactggaacggtgggaccagtaccagaagggcttactgtatcaaatggttcaatgtatgccacaatgtatcattcacctaatgatacgcgtgctcacattgtttcttacaaatttaatcaagtgcctaatcgctatactatgcaaaagttgccatggctaccttggtcacaatttctgcggcttgtatcccatgttaagacaagcccatatattaaattgggacatggacaagcaatcggttcaactcgaaagtatatttatgtgattgctaataaccatttattgcgcaagagctctcaatcagaagaaattatgcagattagtaaaaacaatttgcaaattaaacagatttggacttttaaagtttggaatcattcagctagaacaggtcgttatttccataatgctacttttgtaaatgatcaccaatttattgccgtttaccgtgatgccacagaccaccgttttgaatattgggaagttactcgtcagggtaatagttggtatcctaaagagattggcgctactagaggagattttatgcgcaatgattctcccgttcaaggaattacctatgacaagcataaaaaacagatttatttggcctttaatgattatttgtttaaattgaaacgctcaggtaaagtgctggctagaggtcactttcatacagggcgtgaatttgaggggattagcataaatggtcgtcatttatacgcagagctggcgcaaaggccagaattgttgaggcagaggataagataataggtgtaaaaatatgttatacccagataaattctatttaacacaagatttaaatagaagatttgccagaactaaccttgctcgactaatatttagtgatttgcattttgagaaaacaaatatttctttaattcaaacacaattagttgctgatgggttaaatatagagagggcttccgagaaagataaggaaagaattattcgattaaaacgagcatggcaatatattattaatgaaaataaggtgttatctttagatattgaactaaagatacatttattactgacaggctatggcttccgagataatctaaactacaaacaagaagaaaaatttttcgatgagttaatgaacaacgatacctcgactacagataaggcaatgacattgatgtatcataatatgcgtaatcaattattctggggcggaaataagcgtactgccacactagctgcaaataaattaatgattgaccatggagcaggtttaattaatgccccacttgataagtgggatagatggaacaagctgattagtcaatattatttaaccggcaaaatgaatatgttaaaagattggacctatgaaaatggcattcaaggagtagtgctgaataataattcagatttacctaaacctgatattaatccagaagattatgattaattacttaagcagaccgaataggcctgctttttttgtgtgcaaaagctctttttgaaaatatcatgataaaagttcataatagaaattgtttgtttatgttaaaggagttgttttattttttatgaagaataatgatcacgttaagataagtcctagtagtcttgtcttgatgattttttcttctatttttggatttagtaattcactgacagctttttatcaaatgggttattcaagtatcatttggtatattgtcacagctattttattcttcctgccatcagccttaattttcgctgaatatggtgcttcctttaaaggaattaaaggtggaatcttttcatggcttgaaggatctactaatgaaaaagtatcatttatcggaacttttatttggctggcagcttgggtaatttggttagtttcatcaacccaatttttcttagtttcagtttcaacggcaatttttggtcatgatactaccccaagctggcatttagggtcgctgacttcaactcagttattaggtgtgttggaagttattttcttagtaattgttacattttgtgccgcaaagggaattgataaaataaaggcgattaataatattggtgggatctttactttaggaattgccattggttttacagcagtttcactttttgtctttattttgaatcatgggcaattagctgaaccagtgaccgcacaaaatatggttcattcacctaatccagcatttcagtcaccgattgcggttatttcatttattgtctatgctttatttgcctatggtggtctggaaacaacctcaggagtaattgattcagttgataaaccggaaaagaattatcctaaggctctgattacggccatggtcttaatgacagcactttatgttgtaaacatctttatgtgtggggtggctgttaattggaacaaatcgttaggtggtaaaggtgttgacttagctaatgtcgaatatgttttgattaataatttaggtattgtcactggtcatagcctaggtctatcacattctacttcactggcaattggaactgtcttttctcgtttggccggaattgcggatgtgttatcaggaattgccgctgcctttttgatggtttattcaccgattaaatcatttattgaggggtgtgatccgcgactattgcctaagaaaatggttaagttaaataagcacaatatgcctgaattctcgatgtgggtacaagcaattgtggttagcgttattatcttatttatttcatttggtggtaatggagcacaacaattctatacaattttaatggatatgatgaatgtttcttcatcagcaccatatttatttttaattgctgcttacccattttttaaagctaaaaaagacttagatcggccatttgtttttattgaaggtaagaaaaaagtttgggcaacgacaattgttgtttggttagtggttgcggtcggaattatctttacttgtatagaaccactctttaccggagactggcaaacttcattctggacggctattggtccagtggcctttggtgttattgcttggatttattacgcatataatgaacgaaaagaaaaagcaatggcttaatacgcaaaataagacgaaggattttgtccttcgtcttatttcttttctctattttttactttaagccagctactctgacaacatcacgttcaatcattaattcctcattagttggaataaccataccaacaatagttgagtcgggcttggtaataatggtggcattttctttattagcggctgaatcaggcttaaggcctaaaagttcgagtgaatccatgacatgttcacggacaccaaagtcgtgttcaccgacaccagctgtaaaggcgataccatctaggccacgcatttcaagggtataagcaccaacatagcgaatgattcgattaatgaaaatgtttctagctaagtcagcacgcttcttcttttccccttcgagcttagtcatgtcaccacgtaaatcacgcatatctggtgaaatgcctgaaattcctaacaaaccagattcgttgtttagaaccttaagcatttgatcagcatcaagattttcctttttcatgacaaaagcaagtaaagaaggatcaacatcacctgaacgggaactcatcgtaatacccgccattggtgaaaagcccattgaagtatcgaatgatttaccatctttcacagcggtaactgaagcaccagatcctaagtgacaaacgattaatttcaagtcctttaagtcgcgattcataatttcagcggctttttgactaacatatctaaccgaagtgccatgtgcgccatattttcttgcaccgtatttttcatagtatttatatggaagtgagtacaagtagtgcactggatccaaggtttggtggaatgaagtatcaaagacagcgacttcagggacgccaggcaatactttcatgaaggcattaatgacatcggcttcagcggtattatgaagcggcgcatattgtttcaaatcataaatcttttgtagtgacttttcatcaattaaggtggagtccttaaattcttcaccacccgcaacaattcgatgtccgattccgatgatttctttaggatcgtcaattaaatcatacttttttaaattttcaagcaagattgtaacggcagtttcggaatcaggaatgtcaactttttcttggtgtttttcacctttaaccttgattgtaaaggtggagccgttaagcccaactcgatcagccatcccttcgctgataactttttcatcaggaaaggtgaaaagcttaaatttaaaagaagagctacccgaattaatcgctaaaatttttttcataaattatgcctctttttcttaatttttgcagtgcaacctatccagtaagggcatgcaataaagaaaatgccactaatctgctttaagtaagttcttgcagtaatagtgtcaacgtctttattatacaacttttgctgtaagctcttacagatatgaaactgtcaaatcttttgtgtaaatagatctttctcgtaaattgattttttaattatttatttaatcaaagtaggattctaaggtgtcctgaacctgaccaaagcctttatgaattcgattgaaataacggtcattgtagctcattgcctgaatgccaataaaagcatcaagcgactgttcagttggaaactctgccttaggcttagctttgcgcttgatcacattgttaaatgattcaatcatgttagtcgaataaattgaagctctgatctgcttgggatagttataaaagaccagcagatctggttctatgtctttcaagcttctgataacatggctgtaaaccttgccccatttggtatagaagtcatgcaggacagctgtggcttcttctttgtttgtctgttgatgcacctgtttgaattcgttcatgatcttttcacgatcgtcgacgcgtactttagcgcagatattgcgcatgacatgaaccaaacagcgttgaaaatgagctttaggataagtcctggccaaggctgttttcatgccaacaacaccatcagaaagaaaaagctcaacttgctttaagcctcgggatttcatgttttgaagcatatctgtccagacttcaatgttctcgctaggtgcaatgcagtagtcaatgacctccttgtgcccattaggcttgatgccaatggcaatatagactgcttcacgctcaaatgtttctcggcgcaaaggaaggtatgtcgcatccaaatagacgcagaaaaacttgtcgcttagcttgcgtttgtggtaagcctcaacctttggaatcatctgcttggaaatatttgatacctgagctggactgtaatggctgccatacatcttttcaattagatcggctatttccctggtggtcacgcccttggagtaaagcttgataatcatgctttccaagatatccgagtgctgcttgtagtcaggcagcgtgtgctgatgaaattgaccgttgcgatcccggggcacttgcacttcaattgggccaaattgcgtatcaactttgcggaaataagcaccatttctagagttgccagtattccagccatttctggcatagggatcatagcccagaaaggcagtcaattcagcttctaacaagttattaacagcctgttgtagctctttgcgcaataaatcatttattttgtctggattgaatagagcttgagcaaaatctttggtaaaatcattcatgaaggagttcttctttctgtatgtgtttttttgttcaaaccaatcatacgagaaaggaactcctttttctaatgtttaaagaaataaatttaaggaatcattcatccttacacaaactattttacagtctcacagatatttttttattactaaaatttatatataaatttgattgatcatatataaatttagaatatcaatttgcaacaaaaccgcttacaaactataatgaaattaacatacaatatatattgagaggagaaaaacgaatgacccactactacgaaggctttccacaaagtgaccgcgatgaaaaaatcaagatggtgaatgtggatgaacttgaagaacgtgttaagaaggtaatgccagaaggtgcatattattatattgcttcgggtgcagaaaatgaatggacctggcgtaacaatactgctgcttttaatcattttcaaattgtacctcgtgctttgactgagatggctgatccgcaaactgatactgattttatggggatgcacttaaagacgccaattatgatcgctccaattgcttgtcatggaattgcacataaagatgcggaagtcgcaacgcaaaagggtgctgctatggctggtgcgctctttagttctagtacttatgctaataagagtgtagaagaaattgcagctgcagctccagaagcaccaaggtttttccaactttatttgagtaaagactggaattttaatcagatggtttttgatgcaattaaaaaagctggttatcaaggcattttcttaaccgttgatgctttggtatcaggttatcgtgaagcaaacttgcggactaactttacttatcctgtaccattggacttctttaagcgttaccttggtgcaaaaggtaaaggtcaaagcgtagctcaaatgtacgcttcttctgcgcaaaagattggtcctgaagatgttaaaagaattaagaaagaatcaggtttgccagtctttgttaaaggtgttatgtgtgctgaagatgcctataaagcaattggagccggtgctgatggaatttacgtaactaatcatggtggtcgtgaagttgatggtgctcctgctaccattgatgttttgccagaaattgcgcaagcagtaaatcatcgggtgccaattatctttgattcaggtgtccgtcgtggctctcatatctttaaagctttggctttgggtgctgacattgttggaatcggttgcccatatctttatggtttagccttaggtggtgcgcatggagttgcttcagttattgaacaattaaatgatgaattaaagattgatatgcaattaacgggatgcaagacaattgatgatgttaagcatgctaaattgacgcacattgcttatactgctgataatttgccatctaatactgatccaagcagacgcaaggaatatccggtaactgacgaaaatcaagttaagcaaactgatgcggtatctggtgcttctaagttagaaggaaagccagctccggaaccagagactgataccacaactggtgcttcagtaagataaagcaaaaatataattaatattttcaatatgattgtcattgaataaatgatagtcatatttttttactatcaagaactcagcggctacaatcaaggtgaaagcgattcgatttttggagaggaaaattaaattattgaagagaataatgttttgactgatactgaagagcttaaaatcttgagtgatcttgttgcaataaaatccgttaatgataatgaaattttagtagcaaaatatttacaaaaactattaggagaacatggaattagttcacgtttgttggaatattccacaactcgcgcagatttatttgctgaaatcggaacaggccatcccattttagcaatttgtggtcacatggatgttgtttcaccaggtgaattagatcaatggcatactgatccctttaaattaaccaataaggatggtaaattgtacggccgcggagcgactgatatgaagtctggtttagctgccttggttattgccatgattaatattcatgaacaccatttaattaagcatggtagtatcaggctgctagctacttttggttggtgaaccttctggctacagtattgccattgctcataagggttcgatggatactaagttaacttcccaaggcaaggaagctcatagctcaatgcctgaaaagggttataatgcgatcgatccattaatggatttattagttaaggccaacaaggcttttagagaaacagataaaaacaatccagacttaggtaagttgacgttcaatactactgtttttactggcggggaacaggtcaacatgattcccggagaggctaccgcgcaaattaatgtgcggactattcctgagttcaataatagtttggttgaaaagaaattaactgaattagttaaggcagaaaatgcgcaaggagctaaaatcaaaatgtacatctatatgtcggaaccttcaattaaaactgacggtaagtctgaatttgtaaaattagcccaaaaaattggagcaaaatatgcggaaaagccgattccaacagttgctattaaaccagtaactgatgcttcgaatttgattgccgacaaaggacctagctatccgtttgccatgtttggtcccggtaatgacacgccgcaccaagttaacgaatatgttgatgaaaagatgtatttgaactttgtgaagatctatactgaattgtttgtggcctatttgaataaataatttggaaagtaataaagagcctaggcaaaattttagcctagacttttttattgtattttgaagtattctttagccgcatcactcatccgttcaggggtccaaacaggataccagacaaattctacatcaacatttttaacttcagggacttttttaacggctgttgtaatctgcttgatcaaataatcagtcaaaggacaggcaggtgtagttaatgtcatattgatgagacagatcccatcttgatcgaggtcaatttcataaatcagccccaagttgaccacatcgacgtttaattctgggtcaataacttgagctaaatgttcaataatatcgtttttaattgttttgctatcacgcattgtgttacctacgcatctttaccaaaaatttttgctttaattgcttgacctgttggtgtaccagctaaaccgccgattccagtttcacgcagagatgccggcatttgatgaccaactttcttcattgcttcaatacattcatcagctgggattacacttgtacatcccgctagcgccatatcagctgcgataagtgcattaccagcgccaataccatttcttttgacgcagggaacttcaaccaaaccggcaatcggatcacagactaacccaagcaagttagacatcgcaatcgataaagcttgggcactttgttcagcactgccaccagctacttcaactgccgcggcagcacccatggctgaggcactaccgacttctgcttgacagccgccagttgcccccgcaatttcggcattattggcaatcaccatgccaaaaccgccagcagtaaaaagaaagcgaatcatttgctcttcgctgagctgtaatcttttttctaataaaaatagaacgccaggtaaagtgccggaagaaccagccgtcggggtagcgcagacaacgcccatcgctgcattgacttcgttagtggctatggcattttcaactgctgccatcattgtatcgcctgaaagtgtgtgtcctttctcgcgatattttttcagcttaattgcttcgccaccagttaagccagtttttgaaaagacaccgtttccagattcacctcttttaacggcagctcgcatagtttgcaagttatatttcatgcgctgccagactttttctcgtggcaagcctgatagttgacattcttgttcaataattaattcagaaataggtttgtgcgttttttctgctgcagcaacaatttccttaatatggttatacataatattgccctatgttataaacaaataatattctcaaattttttatttagttcttgcaataaatcaggatgaagataattttctacatcatattcataaatattatagtttttagtatgaaaaattcgtttgcgactaaagggtgctttttcgtgtaagagcgcggtaagctcttgttcaatgcgaatatttttgtgtggatcaactaaaataataataggtaatgcaccagcaggttgaatctcggtattatgtaagacaattttgcgaatttcaattgcaccaccaccgatagagcatccagccaattccactttctttttatcattagacatatttaaaatagcagtattagggtgaccaattgggctaggaccatcttcttcaacaaaacgtaaatctacgccgcgctggcgtgcaatctcaggtgcctttggtacgcgtagatcgtctgagtcaaagcctaaaatacctgccgcaatagcatagtctgttccatgaccacggtgagtttgggcgaaagagtcgtaataatgaacggtaactttactcggggtaccgccaaaaagtttgtaaccagcgcgtccaatagcgacggctccggccgtatgtgaacttgatggtcccaccattacggggccaataatgtcaaaaacacttttataccgattagtcattttaatccctgctttgtaagttattctgtttttaattataacgaataataaagaagattaagaaagttttttggagactgtaaaatagtttgtgtaaggatgaatgattccttaaatttatttctttaaacattagaaaaaggagttcctttctcgtatgattggtttgaacaaaaaaacacatacagaaagaagaactccttcatgaatgattttaccaaagattttgctcaagctctattcaatccagacaaaataaatgatttattgcgcaaagagctacaacaggctgttaataacttgttagaagctgaattgactgcctttctgggctatgatccctatgccagaaatggctggaatactggcaactctagaaatggtgcttatttccgcaaagttgatacgcaatttggcccaattgaagtgcaagtgcctcgggatcgcaacggtcaatttcatcagcacacgctgcctggctacaagcagcactcggatatcttggaaagcatgattatcaagctttactccaagggcgtgaccaccagggaaatagccgatctaattgaaaagatgtatggcagccattacagtccagctcaggtatcaaatatttccaagcagatgattccaaaggttgaggcttaccacaaacgcaagctaagcgacaagtttttctgcgtctatttggatgcgacataccttcctttgcgccgagaaacatttgagcgtgaagcagtctatattgccattggcatcaagcctaatgggcacaaggaggtcattgactactgcattgcacctagcgagaacattgaagtctggacagatatgcttcaaaacatgaaatcccgaggcttaaagcaagttgagctttttctttctgatggtgttgttggcatgaaaacagccttggccaggacttatcctaaagctcattttcaacgctgtttggttcatgtcatgcgcaatatctgcgctaaagtacgcgtcgacgatcgtgaaaagatcatgaacgaattcaaacaggtgcatcaacagacaaacaaagaagaagccacagctgtcctgcatgacttctataccaaatggggcaaggtttacagccatgttatcagaagcttgaaagacatagaaccagatctgctggtcttttataactatcccaagcagatcagagcttcaatttattcgactaacatgattgaatcatttaacaatgtgatcaagcgcaaagctaagcctaaggcagagtttccaactgaacagtcgcttgatgcttttattggtattcaggcaatgagctacaatgaccgttatttcaatcgaattcataaaggctttggtcaggttcaggacaccttagaatcctactttgattaaataaataattaaaaaatcaatctacgagaaaaatctatttacacaaaaaatttgacagtttcagattaaatttcttcactactcaattcaaacatattaataattgatttaaacatagataaaagttgtttaactattaaaaatgaattttgtgaatataatgttatcgataacagaaatcatttttatattgcaaatgaaagcgcatacgtttattgttgaatttgaaaaaacatgattttgtggaggaatttatttatgaataaaaagagtggtcataatatcaaatttaaatcaatttttgtatgtacttcagctattatgagtctttggttaggggcaaacttaactacgactcaagttcatgctgcagaagacaatgcagctcctaaaagttcagaagttgtaggccaaacgaattctagcaaagataatgcagctactgctactgtacaaaatcaaagtaacgcaaaagcaaagcagcgtcaacaaggtgtagctcctcaaaacgttcctacagttttggcagccaaaactaaagatgagggaacaaataactctccagcacgtgaggaagttaaagatcagactaaagtagttattcactacaatggtgatggtgaaaaatgggttccttatatttggggtaagaaacctaatggtaacggcaatgaatacaaatgggccggcaaagatgataatgggtattactcggttattgatttagataaaaactatgaccaagtaggagttttaattaaaaccaaaggcagttgggctggtaaagacggtacaggtgctgatcgtagcttaaatgttagcgataatggcaaagcggaagtcttctataaagcaggtagtgatgatgcccaaaaggtaacaccagagtaccattccgcaaatataaatttgcattattacggtgatgaccaagttaataaggttaatgtttggacagataaggatcaagataataaacaacttattagcttaaccaaacaaggcaatagtcaagatggctcaatcaaattagacaatactgattttagtaaactttttgttgcgccagttggttctgatgaaataacaagagaattcactccgttaccgggtaataaggcgacagatatttatttagttaaaaatgatacagaagcttattatagcaagagttttgccttagctgatcaaagtctatcttctgcatatatgacttcaccagatagtttgactgttgaagcaggtaaggctactactgtcgataaaattaaaggaaaacttagtctgcgaaataatagtattgatcatattgaagcagtcgatgctaatgctgatggtaaagcaaagaaatttattattcataccaaaacagatattgatattttaaaggataaccaagttggactagggatgaactttaaaaatgttgatatcggtccttatgttcgttccaaagcttttgacgataaatatgcctatgatggtgacgatctaggctgcacctatgatagtaaaaagacgcaaattaaactctgggctccaactgctaaagatgttgaattgaatttatatgatagtgttgataatagtgccaagcctacgaatgttattgctttgacaagaggcgatagaggtgtttggactggtattattaagggcgataaaaaaggctgggcttatgattttaagttaacttttggtaatggcaaaataacacagactgatgatccatattctaaagccgttactgtcaatggcgttagaagtgtaattgaagactacaataatatcaaaccgacagattttaaccgaatgccttcattctctaagccaactgatgcaatcgtttatgaaatttcaattcgtgactttagtagtgatcctaactcaggaattaaagataaaggtaagttcttagggatgattgaatcaggtaagacaccaactggacaagttactggtttagactatctcaaggcattaggcatcactcatgttcaaattatgccttcatatgatttcgctagcattgatgaaactaagagtttaaagaatcaatacaactggggttacgatccaaagaattatgatgtgcctgaaggatcatattcttctgatccaactaatccaactgctagaattatcgaaatgaaagaaatgattaatggcctgcataaagctggtattagggtcattatggacgtggtatacaaccatgtttataatcctcaagagcaagcttttgaattaacagtgccaggatattatttccgttacgatgctgataataataccacaagtgatagtggctgcggtaatgacattggtagtcaacgtaaaatggttcgcaagtacattgttgactcagtagtttactgggctaagaactacaatctagatggcttccgttttgatatcatgtccttactagatcgagagactatgaatgatgttagagctgctctagataagattgatcctggtattattacttatggtgaaggctgggaagttggtaaccagaaatatactagagaagaaggaacgacccaatacactgcggataaagttcctaatgttggtttctttagtgatgatatgagaaactcggttaaaggtaataatgatggctccgaaccaggattagtaattggtaacggtaatgaaaaaaactttgataagcatgctgtcttgtttaccgatagttttttaagaggtaaatggttacataatgattcttgggagccacataactatgcaactccaagccaaatggttaattatgccgcttgtcatgatggtaagacgttgtatgattacatcaaggctgcaatgccaaatgaatcagatgagaatattgccaggagagtaagattggctaactcaatgatcatgctttcacagggtatttctttcttccactcaggtcaagaagcattaagaactaaaggtggcaattcaaattcatataattcaccagtaaatattaatgaaattaattgggaaagagttggtgctaataaagcatcagtccaatatttccaaaaattggctaaattacgtaaacagctgccaattttgcatttgaatgatttcaataagatttatgacgagaatgttactaaaattattagttatggtagagaaaccaaagataaaaacatcaagggtgtatttgagtacgaatataatgttaatggcaagaagttattaattgtctttaatgtcaacaatgataaagttgctctaaataatgttgatttatcacatggtaagaaattgttagatagtgatggcaatgtgaaattaagtgataaaactatgctggcaccattaagtacgcttgtagttgatgaagatggaacaatggttttaccagacgtgccaaaaccagatcaacctgtaagtccaaccactccaggtgataagccaggtaaaccaactacaccagaaaatccaaggattccggatcaaaagccagccaatccaattgttccgcaagaaacaattattacacctgaagctccaagtgaaaatagtattatagacaatactaaaaatataattaatggatcagaagagactactacagtttctactcaggataatacaaccactgaaatattattgacccataatgcttatgtgtatgacagtgaagcaaatcctatttatcaaaatgataacaagcttgtcttgaaagctggagatacaattaagcctttggataatggtaaaaagtatagtattaaaggtaagttgttctataaagtagctaaaaatcaatttgtcaaagttgctaatactgttagttactataagttagctcataactcattcgtttataataagcatggcaaagcagttaagaagaatggaaagcgcattttacttaagaagaataagcatatttcacttcattctgataaggtcgttaagattaaagggaagaaattctatcaattaaaagatggtagctttattaaggctagaaatgttaaaagaattggttagatttagatagttaattaaaaatattaaaaaacaagattgtttccaaaatgggcaatcctgtttttttaatcctgattaatcaagctaacgggcaaagtataaacactctccaatgataccgctggatcattaatttcgcaatctctttagtccgttgccgcgcactaattaaatgtgggaataggttctgaatcaattgtgtgccgtcaaatcctgtaattaacgattttttatttaaataatcgttgcattctttagccaataaagccgtaatgtcatccgtacaacaaatcgcatcgtaatcgttatctttcaaaaattgaaggatagcgattacgatgcgataattgattcacgggcgctaattgagcgtaaatcaaatttaacgtcaaaggtattacacacacacatcatccctttgatacgatcactgattggataatagtcttctttggaaccagcaataatgattactttcttctttttttgctttaaaaccgactttgcaatttgcatccccgcatcatagttattcgactgcacagtagggatctgcggactaattacccggtcaaaactaaccaccggtagattaagcttgccactcttctttgaaatctggattggcgagctggtaagtaagcctacgatctttttttgcttatatttatccaaataatactgcatatcttgctcttgataatgatctaaatgcaaaatgcaaaatgcaatcataacctttatcctgcaaaatagtagccaagtattcatacagttctgaatagaaaggattattgatttgcgaaaaattgatttcaattaagtttaattctgttttagcggaaattacattcttgggtttataacccagttttttgatagcttcctttatttttaaagccgaatcaatgccaacgtaaccattctgattaagatatcgcgaaacggtggcaatagaaacgccggcttttttagctatttctttaatagttactgccatgttttacacctttatatgtaaatcctacacactttctatcagtaagtatagcatattctaaaacctgaattgtcaaattaagtgcaacagttaggctatgaggaaatatattgcttaaagagttcttctgctgtgtgatattgaaggattcgacgatgtttgcggttaatggcatcagttgcctgttgaacataagcagctgacttatctttcatgcttttgcctttagggaagaattgacgcagaagtccattgcagttctcattggtgcctctttcccatggagaatatgggtgggcgaagtagatctggcagcctttgatcttggtcatatccgcaaactcagagccattgtcaaacgtgatcgatttaaaacaggcaggatgtctgtcaatctcattttgaagcagccttgggcatgtgcttgcccgatagtcaggaatcttgataactacttcaaagcgtgtggttctttcggtcaaagtcattaaagcaggctgattcttgcgtctgacgcctttaaccagatctccttcccaatgcagcggcgtttttctgtcttcaatctctttaggacgctgttcaatggaattgccaagatgcttcttgtgcaaagcgtgaccgccatggctgtgatgacgcttgttcctgcgtcttttgagcttcataggcagatcaatattgcttatgtccagcaagccctgatcaatatagcgatagacggttggtgtgctgggacaagggtagcctggcatagtccttttgaattcaccaacgaattcatcgatgctggtggcatcaaatttagctttaaagcgtccccaaaaagacagcataatgcttcaatggattgcgctgatagcagtttttgcgacgcttctcataataaagctgtgcagtatcagcgtaatagtgctcatacaataaatagctgctgtctctttgcaggacgcttccgcgtttgatttcgcgactgattgtcgacttatggcagccgacttcttgagcgataacagtacgggaagttatgccggaatccagcattgcttgaatttgtccacgttgtacgctggttaattgatgatagtgcttagaaatgctagaatttgaattggtcatgaagatcttcctttcttgatttttcgtcacttcaagtttaggtcttcatggcctttttgtttaacactcagtgttgcacttcaattttaaatccgggtccattattaattcctttcatagaaaactaaattccttttctaaaggggtcaagagctattatatacagttttctcagcagttacattcgcaaaaaagaaaaatgctaaatttatttaaaatatttagattttttatgcaataaggacaaatagctaggagaaagaacaaagaatatctccccatctattgatgtaacgctaaaacataatttactttctttcttttttgtgtatactaaatatacacaaaaaagaaagaggcgtacaactatgactgtaaaattaagaaaagttggaaattcaaaaactttaacagttcctaaagatataataattactagtaaagagtatactgtgaaaaatgaggggatgaatatagtttttacacccgtcgtgaagaaaaagaaaaatatttttgcaaccaaagaatggcaaaattatgattatcaaaaagacatagaaaatgacgtggaactacaatcagtaaaaccagtgggacgtgaggtagttgattaatgatttatccgaaaaagggagatattgttaaagcagatgcagaacctcattccggacatgaaatgggtggccataatccgcataaaggtaatattagaagacattatgtggtaatgagtaccagtgcctataataaatcaacacatatgtttatagggatgccgattactacttcagataaatatcaaggcaacccacattacgagccaatattaattccaggcagtaatggcactggagtaaaaggttatgttgttttatggcaacttcagaattttgactttgaatctagaaatggagaaattgttaatcacgtaaatattcagctattagacaaacttcaaggtttcgcgaatgatatggtgggactagaataggtaaaacaattatgccaattttaaggctagttcgattatgctgagaggacgattctgaggtcaagttcgactgcagaggttaaaatattaataatcatttaatgcaatagaatgctaattcttatttttatgggaaattagcattcttttttgtactttctaactatgtagaataatgagattttattctacatagtacatctaatcatgcattattctgctatgccaattttggggtgtgttgattatgtagtataattagctatagactaattattcaacatagagtgacgaaatacttgtatatcaaggactaatataaaaattgacagaaggagacgtaaattgaagcataaagatactcgtccaattactgatccaataattttaaagaagtttttgaaacatttacgtgaagatactagtatgggagaaagaaactatgctatatttcaaaccggtaaagcaaccttactacgggtaagtgatgttctagctttgaaaaagaatgatgtctttcaagccaatggcagagttaagaaaaatgcttatatcgttgacaaaaagacaaaaaagcctaaccgattatatttaactccagttagtgatgttttagaggattactatgattggctgcaagaatatgaaaagaagcatccctacacgaagctgttttcttctgaatggctatttccaagttctaggagattaggtgaggatgttccaataagagaaaatagtttttatagaatttgtcatcagaccgggcttaaaattggggttaattggattggctcacactcaatgagaaaaacaggagcttttatggtttatcagcagactaatcataatactgctttagttatgaaaatgctaaatcactccagtgaagcaatgactttaagatagagaccgtaaaatattttgtgtaaggatgaatatttccttaattttattttcctgaatattagaaaaaggaatccttttcccgtatgattgatttgaacgaaaaacatactagaaaagagattccttcatgaatgattttaccaaagatatggctaatgctctattcaatcaggataaaattaatgatttatttagacaaaagctccaacaggctgtcaatgacctgcttgaatccgaattgactgcctttttaggctacaatccttatgagcgcgatggctggaataccggaaattctagaaatggtgcttattaccgcaaggttgatacgcaattcggacaaatagaaatcaaagttcctagagacagaaacggtgagtttcatcaacacactatgccagattataaaaggcatactgatgttttagagcaaactgttatcaagctctattccaagggcgtcacaacccgagaaatcgctgatttgattgagaaaatgtatggcggctattattctccagctatggtttccaatatttctaaagaaatgattcccaaagttgaggcatatcatcagcgacatctgtcagataagttcttctgcgtttatctcgatgccacctatattcctcttaagcgggtcacttatgagcgcgaagcagtttatatcgccatcggtatcaaacctaatggtcataaagaagtgattgactactgtattgcgcctactgaaaatattgagatttggagcgaaatgctcaaaggcttcaagaggcgcggccttgaacaggtagagctcttcttgtctgacggagtagttggcatgaaagaggctatctgccagtcctatcctaaagcgcattttcaacgctgcttggtacacgtcatgcgtaatatcagtgccaaaatgcgggttgacgatcgaaaaaagcactggatgaattcaagcagattcatactcagtcaaacaaagaaatggctgtacaggtgctgcatgaattctatcaaaactgggaaaaagcctacaaaaacgtagttagagatcttagacaggttgagcctgatctgttaaccttttacaactatccgccagctattagagcttcaatttactcaactaacatgattgaatcctttaacaacaggcttaagcggaaaaccaagcctaaaacagaatttccaactgagcagtcgcttgacacctttattggagttcaggcaatggattacaatgaccgttactttaacaggattcataaaggatttgggcaagttcgagacaccctagaatcctattttgattaaaagataaataaaaaagtcaatcaacgagagagattatttacacaaacttcttgacagtctctaatgtcttaactgttaacttaggaaaatgtcctaattgtagtaagtatgacataatttcctttattggaggttatagttagagtgaataggattgatttaactatgaaatatgatgaacagtacaaagtcattaaggatcttgtagatcacaacggcaataagaaaagagcagccttgaagctaggaatatccgttagacaaataaacaggagaatcaagcagtatcaagctaaaggaaaagcggccttcgttcatgggaacaaagaccgcaaacctgttaattgtctcaccacagaaattaacaatcaaattgtaaccttataccgtactaaatatcaagactgcaatataaaacattttgtacagctgttagatcgctttgaggacattcatgtctcttataccaaagcttacagcctgctcaagcagcaggatattctttcccctaagccttggagaaagactaagcgtgccttagccaaaaagaaatggcataagcagcaccctaagcaaagcaaacaagaagtcagcgctgcagttgatcatcaactagctttggcagatgctcatcctcgccatgaaagatgcaagtacttcggcgaagaaattcagatggatgcttctgtcttagtctggtttggtaagcgtaaggcttacctgcaccttgcaatcgacaacgctactggcattattgttggggcttattttgactgggaagagactttgaatggctactatcacgtctttgagcaaattcttaaggaatatggcattcccctttgctttaagactgataatcggactgtattcaattatgagactgctcaaaccaaagctgcccataaagatgtgctgacacaatttggctatgcctgcaaaactcttggcgtagatctaaaaactactagtgtttctcaagccaaaggcatggttgaaagagctaaccaaaccgtccaaggtcgccttaagccagaactaagattggctggaatcatgacaatcaacgaggcaaataaatacctgcatgatgtgtttgttcctgactttaaccaaaacttcagtcagactagtcgtaaagcctggtatgtttttgaaaaggctcctgatgactgcaaaatcaattataccttggccgttctcactggcagagtgtttgatagcggctcagctatttctttcaaaaacaagctttatcaagcaacagatgaatatggcaaattagtctgcttcatgaaaggaactaaatgtctggtaattgaagccctagatggacaactgctaacgacagtagatgagcatgtatatctgcttaaagaaattcctaagaatgccaaaatatcgccagaagtagaccaagagcctaaaaagaaaaggaccaagaaaaagtggattccaccaatgtcacatccatggaagcgagaatcattcataaagcaacaaaagagagctcataaataccatcaatacgtataaaaatagcggagagcaaattctccgctaataattaaataattttgggacattttcctaaattattgacatatttttatgataattcatttgcaagcgtaagtcctcgtaaattggttttccacctaaaatgtccagaatgtagtaagcaacgaaagtaacaataatcattggcaatacttgctggacagtcccaatcatttcagtcagtagcataattgctgtgaatggtgctttttctattgcaccaaaatatgcggccatggaaatcactaggatatgagggaagtacattggcaaaataatctgcaattttatcataatattggcgcaaattattcccaataatgccccaagaactaggataggcatgaaaataccatcaggtacggaagaatcatatgaaagcattgaaaagacaaaccgaattatcaagaataagatcggtagtaaaagaaagtcccatgatccaaaggctttgacattccaattcaaattgaataaattatcaattaacacatgtgaaccaccgagtaagtgggcattaaatagaccaactggaataattaaaattaaaggaatgatactgtgataggctgcagggatttttttaattttactgaaccatggctttagcgaaagtagtacatattgataaatgtatgccattattcccaaaaagataccaattaaaggtaaagcccagtatgcagtaacaggtaaataatcgttaacgggtaaataaaggaatggtttgtttccaaaggctagaatagtaacgaagtcagctgaaaaagtggcggccaagacggctactactttttgaggtttaaaatcaaaagtaatttcttcgaccaagaaaagtgcaccagctattggcgcgctaaaggcggcagccaatcctgcagccacaccgcattattgtagcgttctcaaattttccttgttagatttaaatactttttctgctaatccttgaccaaccattgcgcccatttcaatacaaggaccttcacgacctagcattaatccaggacagatagctaataagcctccaataaatttccgccaaagaatggaccaccatggcatcttattttcatttaaaagaacagcctcgatttgtggtacccctgagccaattacttgttcaaggtaaggcgcagttattttacctaatgttattgcaataatgaacatcaataagatgtagggtacgatcagtactcgctgggctgccatttgcggataaatttgataaagcaacttcatagtttgatcaataatccagcgaaatgcgctaactataactccagtagttagcccaactgaaattgcttgaaccaaagttttagtcatgttggttgaaaaaaggttttgctaaaatctgttttgcatttttaatcattacatttccccatattacagacgatacatcctttttatcctaacaaaatatagcaaaaaaggcatttatgtttttgatgaatgatcttatttttgtaaaaattgttgttcccaatcatagacattttttatatgcttctttaaagcgttagaggctaacaaaatatcttttttctcaactgcagaaataatatccattatttcctgaaccgaggatttcatacaacgatcattgtctacgatggcataacgcatacgattggtttgagtacgtaaaagatcgatggttcgctgaagcgtgggatttccggtattttcagttaaaaatacatggaatagttcatcaagtttaagataagcttgccaatcatgttttgctaaaatttcttggaattttattccataatcattagccagttgtggatctaaattggaaaaatttttttccaaggcataactctctaatagagaacgtaaatcataattgtcttttaattcagctaatgtaatatggctaacgatttttttgtccttgacgaactagtaagccttcattttccaattgtttgattgcttctctaattggagtacgagacatgttaagtttaatacgcgtttgattttctgataaaagatgacctggcttaaaatgaccagtgtttatttgatctttgataaaaagatatgctttttcttgattattcatttggttctcctaactaagataattttacaacttttttattttttatattatttgcaactaataaaactaaaaacttgtatacaggttatctgtggtaaatcgttgacttacaaaatataagttttactatgtaattgtaagttaaattttgatagaaatgaggaaagaaaaatgactaaaattgcagtacttggtgcaagtggacaaattgctaaattagcagaaaatttatttttggaagataaaaataatgaattaattttatttttacgccatcctaataaattggataaaaaagatatcgatgatcaacgtgaaaggattgtcgtaggggatgcaagtaaattggatgaacttgctccggctattaaaggcgcagatatcgtttatgctaatttagctggttcaaatattgaagatcaagctaagacagttgttaaagctatggatgaagatggtattaagcgtttgatttggatttcctcgttaggagtctatgatgaggtaccaggcaaatttggtgaatggaacaagaatattttaggttcatatttgaccacttatcgtgcagctgctgatcaaattactgctagcgatttggattacacgattattcgtccagcttggttgaccaataaagatgaagttgactatgaaataactgaaggcgcaactaccccatttaaaggaactgaggtctctcgtctaagtgtggctagttatgtaaatgaaatagttaaagaccaaagtaaagacagtcgtggtaatgttggtttaaataaaccaaataccgacggtgataagccagcttggtattaaaacaaaaaaataaagaccagcttcaaactgaaactggtctttattttggcttaattatttttcgaattgtttgccccaagcccatggatcttcgtgccaggtctttaagacatcatattgcgtgctagaaatatgacctgactcattttcctttttgagtaattcagggtaggaaagaagcggagcatatttaacattagctttagcaaagttttcttttgcatccggtaggtagtaggtgaaaattgaagaaacgccaatgacgttgccaccatctttttcagttgctttaactgcatttaaaacggaaccaccagtggtgattaagtcatcaattaaaacgatcttatcatctttactgaaacggccttcgatttggcggcctttgccatgatcctttggcttaggacgaacatagatcattggtaagtgcagtttatctgcaacccatgcggcatggggaataccggcggtagcgacgccaccaataatagtagcctcagggaattctttggcgattaaattagctaaatcaccagcaatcatatcgcgtaattctggatatgaaaccgttaacctaaggtcggtgtaaattggagaaagcatcccacttgcgtaagtgaatggtttgtcaggtgagatagtgataattttttcttgaataagttgactgataatttgatccttatgcattttagttaaactcctttttaattgcttcatatgcagcttctgggtcactggctaaagtaattggccgtccaacaacaatagcgcttgagccccattctttggcttgcgctggtgtggccacgcgagattgatcgtctttagcattgccagcaggccgaattcccggtgtgacatataaaaagtcatcgccaactttttcgtgtaattcttttacttcaagtggtgaacaaataaccccatctgctccagagtgcttagccatttttgctagcgaaagaacttgctctttcattgacagtgcgcaattttgttcatgtgccaatacttcatcagaaatcgaagttaattcggttactgctagtaacttaggcacgcttttgccaacaggtgtacccgcgattaaaccgtctttagctgatttgatcatttgactgccgcctaaagcatgaacggtagtaaaagtaattcctaacttagctaattgtttagccccgttataaacggtattagggatatcatgcaattttagatccaagaaaatcttataaccttgctcagctaagtctttaaccacttggttgccagcgtgatagaataattccataccgactttgataaagacgttttctggtttgcctaatttagacaaaatcttatgcagttgctcttcattgtcaatatctaatgcaacaattacaggtttcatttttcctccacaaaaaaagtctatcttagcgcagagagacaccaaggatagacttttcctagataatttaagtcaatattttgaacttgcggtctctctgtaccgtttaaagtttgatcaaggtgaagtttaacacctcaaaagtaaaaatacaaataaaatttttgcttggaaaaaattataatcacgtgtagaatcatttcttgaaaaaataaagagtgtccgtgagcattcattttggaggaaaattatggttaatacacatgtaaaattaccaggtttagatttgaaaaatccagttatgccagcaagtggaacttttggcttcggcgatgtgcctgcagctaagaagtttgacttaaatgatcttggagcaatggttattaagacaactacgccacatgcaaccacaggtaatccgcaaccacagattgccgttttagatgatggggttttgaattcggttggtcttactaatcctggtgtgaacaaggtgattagtgaaaagttagaaccattgagaaagcaatatccagaattaccgatcgtggctagcgttggcggtgatagtgaagcagattatgttgaagtagcacaaaagctgtcaaattccggcttggttaatgctttagaaattaatgtttcttgtcctaatgtggcccaaggtggaatgagctttggcgtgcatgccgatgtggttgaagaattgactagaaaaattaaagcagttgtcaatattccaatttatgtgaagttaacaccaaatgtgactgatatcactgtaattgctaaagctgccgaaaagggtggtgccgatggcttatcgatgatcaatacattgctagggatgcgaattgacgtgaaaaaacgcagaccactgttaggccataatatgggcggtttatcaggtgaggctgttaagccaatagctattagaatgattagtcaagtgcgtcaaattacttctttgccaattattggcatgggtggcattgcttcggccgaagatgtggtggaatttatgttagcaggtgctaatgccgtagcggttggtactgctcattttaaagatagtattgcttctaagcatattgcagatgccttgccgcaagaacttgaaaaattaggcattgaagatatcaatgaattagttggtcaagtaaaatttaattagagcttgacaaacgtttctaattacagtaactttaaagcaatgaatgtcctttaaaattagtcccgtgaggctagcgaggcaggcttaacttaagtttcgactttactaaagctcctagtctcagttgagattgggagcttttttcatgggcagaattaggaggctataatggcaaaagaaatctgggatgcactagcaatgaagcgtgctttaacccgtattacttacgagatcattgaacaaaataaaggaaccgatgatttggttttggtagggattaaaacgcgaggcgtttacttggctaaacgaattcatgaccgtattcagaaattggaaggcgttgatgtaccagttggtgaattggacattaccttatatcgggatgatcgtcatgatgctagtttaaagcaagatccagttgtcaattctgatcaagttggtgttaatattgatgacaagcatgttgttttgattgatgatgttatctatactggacgaacaatcagagcggcgatggatgctttgatgcacgttggtcgcccaagttcaatcagagtcgcagtgctagttgatcgtggtcaccgtgaattgccaattcgtgctgattttgttggtaaaaatattccaacttctgccgatgaacaggttgctgttaatgtaattgagaaggacggcaaagattcagttgaactgaaggctttaccaaaataaaaagaagatagttaaatatccaaccatttaattgactccagagagggccagaagggttgatttcttttcgtgtacacgggaagactctaggcctggagcaattaaatgcttcaggcttttttgtatagaaagaatagaaaatggaaaatttaaatcttgttaatttaccacattttgtgagtgttgaaaatttggatagtaatgaagtagaagccttaatcaggagagctgagtacttcaaaaaaggcggtgcaacaccacgtttaactaagccagtttatgtaactaatatgttttttgaagattcatctagaacacatacgagctttgaaatggctgaaagaaaactaggtttgacagttattccttttgatccggctcattcgtctgttaataagggtgaaaccttatatgacacttcattaattatgaacgccttaggtgtcaacttagaagtgattcgtcactcacagaatgagtattacaatgatttgattaacttaaaagaacatcaacatttaaatattggtgtgattaacgctggagatggtagcggtcaacatcctagccaatgtatgctcgatatgatgactattcatgaacattttggccactttaaaggcttaaaggttgcaattgttggtgatattactaattctagggttgcaaaaagtgacatggaacttttgactaggttgggcgctgaagtttacttctcaggtccaagttactggtatgataaagaattcgatcaatatggtaagtatgaagaaattgatcaattagtttcaaatatggacgtgatgatgctcttacgggttcaacatgaacgtcatgcaggcgatcctaatgaaaagacttttaatgctaaagcatatcacgaaaaatatggtattaatcagcaacgctatagtgcattgaagcccgacaccatcatcatgcatccgggtccaattaaccatgatgttgaacttagcggtgatttagttgaaagcgataagtgcatgtttgtcagacaaatgcaaaatggtgtgttcatgcgtatggcaatgatcgaggcagtattgcgcggtagacgacttggaggattagaataatggcaacagtaattaagaatggcacagtttatcaaaatggtcgtctaattaaagcagatgttttaattgaagatcaaaagattaaagcaatagggactaacttaacggcagataaagagattgatgcaagtggcaagctagttagtcctggactggttgatgtccacgttcattatcgtgatcccggacaaacttacaaggaagatattaaaaccggtagtgaagccgctgctcatggtggttttactatggtaggggcaatgcctaatgtaacgcctgtacctaatacgcctgagctaatgcaaaaaatggtacaagaaaacaatgaaaaaggtgtggttcatatttttcaatatggaccaatcactaatgatgaaactactgatgtcattcctgattatgcagcattgaaaaaggctggtgcttttgccttaagtaatgatggtcatggagtccaaactgctcaaacgatgtatttggcaatgcaaaaagccaaggaaaataatttgatcattgctactcatgcacaagacgattcgctttttaataaagggatcgtgaatgaaggacctaaagccaaggaattaaacttgccgccagtaactgaattagcagaaacaacgcaaattgctagagacttgcttttagcacaaaaaacgggcgtccattatcatatttgccatgtatcaactaaaactagtgtggaactggttcgaatggctaaggcgcgtggaatcaatgttacctgtgaagtagcgccacaccatattttattaacagatgacgatattcctaaggacaacggttattataagatgaatccgccattgagaaataaggaagatcaagcggcgttactagtgggactactagacggtacaatcgatttaattgcgactgaccatgctcctcatgctcgcaatgaaaaagaaggtggcatgaagggcgcagcatttggtattactggtagtgaaacagcattttctactttatatactaaatttgtcaaagaagaaaaagtcttcaccttggagcagcttttatcatggctctccgataaaccagctaaaacgtttggcttaaaaaatgccggggtacttgaaccaggtaagccagctgatattgcgatttttgacttagaccatgaaactgaattaaaagaagaagactataagtcaaaaggcgttaatacaccatttacgggcgacaaggtgtatggtgaaactgtaatgaccatggttgatggtcaggttgtatacagaagggatgaacaataatgcggtatttaatcctagaagatggtagcatctatgctggcgagggttttggcgctgattgcgaaacagttggtgaagttgtatttacaacagggatgactggttatcaagaagcaattaccgaccaatcttatgccgatcagattttggttttcactaatcctttaattggaaactatggtattaccttggcagattatgagtcacttgagccaaggatcaaaggcgtaatttgtcaccaggttgcccgtcatcctgataattggcgaatgcagacaaccttaccaaagtttttggagcatttgaacattccaggtattcagggaattgacacgcgtgaattagttaaaaaattgagagttcacggtacattacgtggtaagattgcagattcaaaagaaaatgcagaaaaaattgcggcagaattaaagattaagaatgtaactcaaggtgtaattagccgagtatcaaccaagtcaccatatccagttcctggttcgaaacgcaatattgtggttatcgactttggaattaaacacagtattttgcgtgaactagcagaacgtgattgtaattgtattgttttaccatatacagctactgcccaagaagtattaaaccttcatccagatggtgttcttttgagtaacggccctggtgatccagaagaaatggtagaggcaactaaaatggtgcgtgaagtagaaaagcatgttcctttgatgggaatttgtatgggacaccaagtctttgctttagctaatggggctaaaacttacaagatgaaatttgggcaccgcggttttaatcaccctgtacgagagattgcaactggtaatattggttttacttcacaaaaccatggttatgctgtgtctgcagattcaattgacaaggataacttaatgattacccacgttgaagtcaatgatgggacggttgaagggttacgtcataagaaatatcctgcattttcagtgcaatttcaccctgatgcaacaccgggtcctcatgatgaggtttcgttattcgacgactttatgtcaatgattgatcagagaaaggaagaagagcgtcatgcctaaaagaacagatattcataagattatggtgattggctcaggtccaattattattggtcaagctgcagaatttgattattctggtacacaggcatgcttggctctgcgcgaagaaggctatgaagtagttttagttaattccaacccagctacgatcatgactgatacaacaattgcagataaggtgtacattgaacctctgacagttgaatcgatttcacgaattattcgtcaagaatatcctgatgctattttgccaacacttggcggtcaagtgggcttaaacatggctatggaacttgccaaaacaggaattttggatgaattacacatcgagcttctaggtactaagctgcaatctattgaacaagccgaagaccgtgaaaaatttaaggaattatgtaagtcattaggtgaaccagttccaccttctaagacagttaatacagtcgaagatgccttagctttgggagatgagattggctatccgatcattgttcgtcctgcctttacgatgggtggtaccggtggtggtatctgtaataatcatgaagaattagcagagattgccaaaaatggattggaactttcccctgtaactgaatgtttgattgaaaaatcaattgcgggctataaagaagtagaatttgaagtaatgcgcgaccatgatgacaatgcaatgattgtctgctgcatggaaaactttgatccggtagggattcacactggtgattcaattgtcttttcaccaagtcaaactttatctgataaggaatatcagatgcttcgtgattgttcactgcgtttgattagggctttgaaaattgaagggggatgcaacgttcaacttgctcttgacccaaatagctttaattatgatgtaattgaagtaaatccgcgtgtttcaagatcatctgctttagcttctaaggcaactggttatccaattgctaagatggctgctaaaattgcagtaggaatgactttggatgaaattaagaacccagtaacgggaacaacctatgcagaatttgaacctgcattagactatgtagtctgcaagataccacgctggccatttgataagttccctaaggctgatcgcgttttgggcacccaaatgaaagcaaccggtgaagttatggcaattggccgtactgcagaagaagctatgcaaaaagcggtaagatcactagaaattgatgaaaaagatctttactcaccagaagcacacgtagctagtgatgaccaattagagcaaaaattagtcaaagctcaagatgatcgtctcttctatttagctgaggcatttagacgtggttattcagctgaagatgttcatgaattaacgaagattaatttctactttttagatatcgtgcaacatatggtcgaattggaaaagacacttgaggaaaataaagatgatgttgatgtattgcgcttagctaagaaatatggctttagtgatccaacgattgcctctttgtggaatgaaactgcagatgaggtaagagcatttcgggaaaagcatggcatcatcccagtctacaagatggttgatacatgtgctgctgagtttgaatcaaagacaccatacttttattcaacttatgatgctgaaaatgaatcacataagactggtaagaagtcggtgatcgttattggctcaggtccaatcagaatcggtcaaggtgttgaattcgattatgcgactgttcactgtgtcaaggccttgcaaaagatgggctacgaagcaattgttatcaattctaatcctgaaactgtttcaactgacttctctatctcagataaattatactttgaaccattaactttggaagatgtcttgaatgtctgcgacttggaaaagccagaaggcgtgattgttcaatttggtggtcaaacctcaatcaatttggctcatggcttagaagaacatggagtcaagattttaggcactaaagtagctgatgttaaccgtgcagaagaccgtgaactgtttgatcaaatcattaagcaacttcatttgaatcagcctcaaggtttaactgcaactactcatgaaggcgtacttgaagctgctgataagctaggctatccagttttagtccgtccaagttatgttttgggtggtaaggcgatggaaattgtctacaccaaggcagagttagaagaatacttgcaagaccacgttgatattgcagcagaccacccaatcttggttgatgattatcttgatggtcgtgaatgtgatgttgatgcaattagtgatggtaaggaagttcttttgccaggaatcatggaacatattgagcatgccggtgtccactctggtgactcaatggctgtttatccaccacaaaccttctctgatgaagttaaagaaaagattactgatgtcactagaaagcttgctttgactttgaactgtgtcggcattatgaacattcaattcattgtcagagatggtgaagtttacgtaattgaagttaaccctcgggcaagtagaacagtgccatttttaagcaagatcacgggtattgaaatggctcaggtcgctacccgagtaattatgggcgaaagtttggctgaacagggctacggtgatggtcttgccccagagccagacatgatctctgttaaagcaccagtcttctccttcagcaaattatcggacgttgatgcatatcttgggccagaaatgaaatcgacaggtgaagtaatggggagtgatcacacttttgccaaagctctctacaaagcttttgcaggtgctaagatgcaattgcctgaaaatggtaatgtattacttaccatcgaagatcgagacaaagaaaagattttaccaattgccaagagatttgcgcggattggctacagaatctttgctactaagggtacagctgatttcttgcgcagtcatgatttgcatgttgatccagtaactaaagtgcatgaagatgaagacgccaaggataatatcttgaatgaattaagaaatggcaagattgacttggttatcaatacgatggggcacgatattgaaaagaattctgatggcttcatcattagacaggttgccattggtcaaaatgtaccattgattacagcacttgatactgcagatgctttgcttactagcttggagaatagatcatttgctactgatgctttgaagtaggatggttgaatagataaaaataatgcatttctctattgaagtaggagaatgcattattttttatgcaaaaaataattttccctgaattgtcaaattaagtgcaacagttaggttatgaagagatatattgcttgaagagttcctctgctgtgtgatattggaggattcggcgatatttgtggttaatggcatcagttgcctgttgaacataagcttttgacttgtctttcatgctcttgcccttagggaagaattgacgcaaaagaccattgcagttctcattggtgcccctttcccatggagaatatgggtgagcaaagtaaatctggcagcccttgatcttggtcatatccgcaaactcagagccattgtcaaacgtgattgatttaaaccaggcaggatgtctgtcaatctccttttgaagcagcctttggcatgtgcttgcccgatagtcaggaatcttgataactacttcaaagcgtgtggttctttcagtcaaagtcattaaagcaggctgattcttgcgtctgacgcctttaaccagatctccttcccagtgcagcggagcttttctgtcttcaacctccttaggacgctgttcaatggaattgccaagatgcttcttgtgcaaagcgtgaccgccatggctgtgatgacgcttgttcctgcgtcttttgagcttcataggcagatcaatattgcttatgtccagcaagccctgatcaatatagcgatagacggttggtgtgctgggacaagggtagcctggcatagtccttttgaattcaccaacgaactcatcgatgctggtggcatcaaatttagctttaaagcgtctggagagcattctcaaaaagacagcataatgcttcaatggattgcgctgatagcagtttttgcgacgcttctcataataaatctgtgcagtatcagcgtaatagtgctcatacaataaatagctgctgtctctttgcaggacgcttccgcgtttgatttcgcgactgattgtcgacttatggcagccaacttcttgagcgataacagtacgggaagttatgccggaatccagcattgcttgaatttgtccacgttgtacgctggttaattgatgatagtgcttagaaatgctagaatttgaattggtcatgaagatcttcctttcttgatttttcgtcacttcaagtttaggtcttcatggcctttttgtttaacacttagtgttgcacttcaattttaaatccgggaaaaaataattttcacaagtgaactaataattctgagataaataagcgatagatagcattcaatcaagatattgtgaaaaaaatatgtatcacaaactttattatagagccatgagtaagaatatttcactatcttttgtaagcgaatacatttataatctgagataaggaagtgaagtgtttagggggaaataaaaatgtggatttcgtttttattggctttaattccaattatttggcttatttactctttggcaattcgaaaaacgcctgctattaaagcatgcagcattggactattaattactatcgtattggctatactgggatttaacctctctatagttgacactttgacgggtgctttagagggcattctgatggggctatggccaattgtttatgtaatcgtggctgcactgtttacttataatgtaagcaattattcaggtggaattaaaattattcaagatactttgtcgtcaatcactactgatcagcgtattttagttttgattatcgcatggggatttggcggattcttagaagcaattgcaggttttgggacagcagttgcaattcccgctgggatattaattggatttggtcttaatccgattaatgccgccataatttgtttaattgctaatactacaccaactgcctttggtgcaattggattaccagtgattacactgagtgacgtaactaatttgcccgttactccattatcatttgttattactttacaacttgcattattaattattataattccgtttttattggtgattctaacagatggcggagttaaagctatcaaaggagtgggattaattaccctgatgtctggtttgtcattttcaattccgcaaattttggtagcaaaatttgttggtccagagttaccagcaattgttggttcaatttgttgtattttgactacagttctgatggcaaaattatatcatcatcaagataatgacataaaagagaatattgagaagcacagcgctatcgaaattttgcgtgcaagtttaccatttattttagtgttcgtatttgtggttcttgcttcatcactgtttccagatattcagcatctattgggaaaggtgacgtcttatattaaggtgtatactgggaaagatgcagaactgtttaagattaattggctttcttcaccaggaacattaattttgctagctacttttattggtggattaattcaaaaagttagtttcaagaaattaggacaaatcttaaaatcaacaatttttggattatggaaaacattaattacaatttgttctattgtggctttggccaaggtaatgggctacgcaggaatgacttcagcaattgcggcagcattagtagttctaatgggaccaatatatccattagttgcaccgttaattggtgctttgggtacgtttattacaggatctgatacctcagctaatgttctttttggtaacctgcaattgtcttcagctaaggctttaggcgtaaatagtaattgggtagttggttcaaatatggtgggagcaactgctggaaagatgatctcacctcagagtatagctgttgcttcagctgcaattggacaagatggatctgaatcaataattttgaagcaagtggctaaatggtgcttattgtatttgggaataatttgtatattcctatatggaataggctttgccgtaggatttttataaaaataatttaaataactcttggtgttctgatatatattgatttgcacttgtcatccattaatagtaaatcgcttgcattaaaagcgctttcgttgatagaatgctttttgtaacttttttacattaataagggagacaaaacgaatgagttatttatttctgttcattccggcaataggatggggtcttatgcccatgtttgttgctggtgtcaagaagagtaacatttaccaccaaattttaggtaccgttcttggtgcatttatctttggtgctgcagttactctcattaagcgtccatcttttaatgcgactacttttattttagcaatgttagctggtgctgcttgggttattggtcaagttggtcagtattacagttattccaaggttggggtttctgaaactatgccaatttcaactggtttgcagttgatcggtgtgccacttgtaggtgtgttgatctttggtgaatgggcaagcactcaagctaaattgtttggatttttagggatcttagctttagttattggtgtagcatttacatcattgactgacaaaggtacatctgaaggtggaaaaaagaatcagaccactacaatgattgtgctggtattgactacacttggttacattacttcaagttccattccaaaggccttgaagggtgacagcataatgattttctttgctgaaaccattggaatgttggttgcagcaattgtttatttaattgcaactaagcaaacacaagtctttaaggaaaaagaaagttatcaagtaattcctgccggtgtgatttacgcaattgctgctcttgcatacattgtttcagttaagatgaacggtgtaaacctagcctttgttatgtcacaactttgtgttgttatttctactcttggtggtatccttttcttacacgaaaagaagacacaaaagggtcttgtctatactgtgatcggtttaatattaattgttgccggtgcagttttgacctcagtattttaatgaattttaaataaatattgaatgaactccaacatgataattgttggagtttttgagtaaaaaaattcatgaataaatataaaatgaattaaaatataagtagaagccaaagagaggatgatttctatgagtgataatacagtatacgtgatcgacggtcgtcggtatgcacgtaatggagaaattgtcgaacataatgtgcatgtttatagttcttatcaaaatctgattgctgcatttaagccatttttggaagtttcaaataaagaagtgcatatgaatggcaaaaatgagatgcttcaggttagaatatatgatccatcaaatcaatttttgacaaaatataaatttgatatttatgaaaagaaaatagataatttctttccaagtactactgaacatatttagcaaaggaatgatccgatgacttttaacaaagaagaaaaagagcaagctttaaagcggctaactgatgaggaatataacgtaactcaaaaggccgctacagaatatccttttaccggaaaatatgatgatttttatgaaaaggggatttacgttgatgtagtgtcaggtgagccacttttttcaagcttagataagtataatgcaggctgtggttggcctagttttactaagccaattaagaaattaacttaccaccgcgatcaatcgcacggaatggagagaacagaagttaaaagtcccgaagctgattctcacttaggtcatgtttttactgacggcccagtggatcaaggtggtttacgttactgcattaattccgcagcattgagatttattccatatgatcagttggaacaggctggctatggtgaatataagaaaatatttgaataaaaaatacggcagatacttaaaataaatatctgccgtattagtttatatattaaaaattatttctcatagaacttaatttcagtattggccaaatcaactgtataagtttcttcttcaagtggtcgtttagtcattccttcatcagttgagtagatgatcaaggccaacttactaccagatggaagagtgtagtaggtaggttgaagcaagaagtctaaatcgtagaacttgtcagcatcaatcttctcaggtcttttcatgtccttatagttttgtaagttcatgtgagccttagtgatcaacttagccttagtcttcttgtccggcacaaattcttgcaaagtatcagtgccaaatctatagccaagttcttgaccgccgcgcattaagaacttaggtgtagcggttaagcgtcttctttctcccaattcaactaaagcaacagaaatttgtcccttaggtaagctgcctttaactctaacttttacttcaggacgaccgacaatcgtagttgggtgaataaattcgtctgtttcaaaacgcaaacttggtttagcccatttttcatcaccacagatgaacttgtatagccagtcgctttctgagatgtcagccttcttaaattcaatgccaccttcatcgacaaatgattgttgtgctttgccattgccatcttggaaaagctcgccgtcatcagttgggtagtaggttttcttttgacctaattcatttgaccaatccttttcttcgtgccacttgtcagcttgcaagttgtcctggatcatgacggttggccattgcttgtaagcattgttttcaatccctagtaattcatgtacaaaccaaaggttcatcaagtcagtaaaatcaatagaaacaaagttgttcatattgtagtgaggaccttggtgtaggaaaagataatgcttcattggcatttttttgactagttgccaaattttataaacattctttggcttaacgttccagtcatttaaaccgtgaacagaaatccaagaacatttgatgccgtcagcgtgatggcggtagtttcttgcttcccaaaagttggaatattgaccggtttcacggtcttcttttgttaaaagctctttttgcatcttgtcgtattccggtttgatcttcaagtaagaacctgcatcccacaagtttgattgacaagtttcagccagtaaatcaaggtcttcaccttggcaggcttcgggtgcgattaccaaaccgtgttcacggtaatagtcataccaagaagaaatagcagcttcagaaaccacagttttcaaacctttaaccccagtagtggcaatagcaatttgcaaagtgcctaaatatgaacgaccagtcatcccgatattgccattgcaccagtcagctttggtttgaacagatctagtacggtcagtgtaagcaatacgatcgccgtggagccattcgataactgcagcagctgattcagtttcttcaggtgcaccagtaatacgaatcccatcactaccacgggtaccgattgctccagcaaaaacactggcaaaaccacgagcaagcatatactcatttaatggataagaagatttatgtactgcttcttcggtagctgggtggttagagtcgtctggctgctttgctttaactattggtgaatgaacatattgtggatcattccaatcggcggcatcagataaattttcatcaacattatggttacgcttttcattagcgataattccgccgaaatatggtgaagcagtataaagggcaggcacttttaagcctttgttagtttcagctggtcggaaaacagtaacttgaatcaagtcactcttaccatcatgatcagtatcaagatcagtttcaacgtaaacaacttcacgaattactttgttggtatcgaagacaggaatagctttgccattgaaaaatttaaacttattttgtccccagaattgagtaaagtaccccttaccagccattacatcgagcaaaatttgaccgtttttggcgcgagtattgagcaaacgataaaaagcagagattaactttttgacatcagaaatgtcttggacaaaaggtaaagcattcttttgcataaagccggttggatcggctaattcgtagtcataatgaacatgatagccaagtaattgtaagactacattatagaattgagcagtaccaattgattcaggctttccttttaaaaagtcagctaaagtttgctcatttgaaacagcaaattcagataattttgttgtcttagcagcgtcagtttttgcttcagcaattgtcattttaacgagcttgcccagcaaatcgttaaaattccagtctgcataatttttaggtaagaaattgatgtcgattaattcttttacttgttgatcgaagtcagtttcgacataagcgtattggttatatttcatatttttctcctttgcagtttaattactttctattttacttttaattgtggctataaccaatagatatggaagttaataagcgaaaaatatttttattttggtattcttttctttaaaatggacttaaacaaatcggtgatgctaaatgagaaaaaagttttcacttgtcttgctacttacaacgatatttacaatttcgctgacagcttgtactaatcagaataaggttgatcatactaaaagtcagactaaaatcacctcaacaccgacattatttttccacggtggtggttcgtcatatcatgctgaagaacacatggtggcagcagctgagaaagctggagtcacgaactcagtgattagagctgaggtggcgcctaacggtaaggtttctttgagtggaagttggaaaaaaggtgccaaaaatccaattgtagaagtcaattatgaaaataaccgtgagttgaacttttctcgacatggtgtttacgccactaatgtagtgaaggctctgcaaaagcgttatggtattaaaaaatgagcatgttcggtcattctttaggaaatatttcgatcatttattatatgctgcaaaatggacgtaaccggaagatgccacaattagtcaagcaagtcgacatggcagaacattttgctggtttgaactttagccgtgttcccgcctcaattcgtcaacctaaaggtttaaaattgaattctgccggaaaaccgaacaaaatgaatgctagctatcggaaaatgacgggtgtaagagaaacatatccgaaaaataaagttcgtgttttaaacatcattggagatattggtggtcaaaccgatggaacagtacccaatgtatcatctttgtcattaaagtatttagtggcagatcgtgctaaaagctatcaggtagtgaagtttactggaaaaaatgcacgtcactccaagttgcatgagaatccaaaagtagataaagtattaatcaaattcctgtggaataaataaagttagtaataggcatgcgaacgtatgtctattttttgtgccttttcttaatccaattacttgaattataaaataatgcgtgtataatattcatctaattaataaagaaagggcatggttttatgaagctattaaagactaaaatcttaacaattctgtgtggcttgctaacattgaacggcttagccatgttgttttcaggattgattatccaaatggacgaagttgctgattttgattcagcccaaagtttagcagttgctaattcgactaatgccattattttggcaggaattattatgattttgctttttggggcattgtttttcgatggttgggctaagctcaagaacaggcatgctaagcacgttaagttagtttaatagaatagataagactagctctgaagtgagctggtctttttttgcccaaaattaaagtcttctttaccgtttttttacttttgcatgtgataatgagccaaaattaatcagggggatagttatgggattctggtattattatgttttgccattagtgacggctattttattcgtttggctaggaaaccgagttatggtgactaaaaaatggattagcataattttttactcattagctggagtaggctatttaattgcatcggtttttgctgttttttatatctatgcaacagtagaagaaattttaacgccagatattttaacaaaaataggttggcattatttttggagtgataattttatttttcttcttaccagcactgttctattaacaattagctattttgtactaaaacgtggtagattacgcagattacggatgaaataggatgctcaaaaatgataagattatttttgaaaaaatagaataatgatggggtgaaaaaatgactttaccatttaaggcagttgctgtagatatggacggcacgtttttagatgatcgtaagcagtttaatcacaaggaatttgatcaaattttgactgaatttgaacaacgaggagtacattttatcgtggcttcagggcgtccttatgttagattgaagcaggactttggcaagtttgccagcagaatggatttcgtaactttgaatggctcgagattaatcatcaagggtcaagaagctggcagttatttgcttaatcgcgatgacgttttaaagctaattcatgatgtacatgtgaaatatggtgaaatggctacgatggtttttggccgagatattgcatatttgcatagcaatgttgaaaaagatgaacgcgactttttggcttactttgctggtaatagcactgtaattaatgactggaatgacttaccagataagatttatcagatcacatttggaatggacagttctaaggctgcagaaattgaacgagattttaattctaagcacgataaccagatttctgcttttgcttccgctacttttgccattgatgttaacacacaaggtgttaataaaggcgccggattaaagcatctcctagaaaagatggggatgacctgattgcctttggcgatgggggtaatgacatcgatatgttgaaatttgccaaatattcttatgcaatggcaaacggtatggacaaggtaaaaaagcaggcgaaatatattgcaccggccaatacggagaacggtgttttcaaagttttgcaaaaatatttagctgaagataaaaaatagcttgtaaaatcaaattaatatgatatagttttaattaacttatagaaatagaggaaattgccatatgattcgtttactgaatctctaatatttgatttgttgtttagcaaaatactgtctttgcaccttgtttagtgcacccattttttgcttgcataccaagtattagcagtagatgaattgagggtggttttctttatcgaaatcaacctttatttgttgcactgttaataggatgtgagcatccagaacagtgctttttctttgcgataaatcatgttagagatttttttgctgattatacgtttttgtcaaaaaagaatgaggaaaataatgggtttaagagattatattaaagctaaccgtcagcgggcaatgttagttctgtttttgattacgctaacgcaactgacaactacaatgtacacctacttaactagtccgcagttaaatgcaattgcaagtggtaaattcgaactgtttttggaattaatctttgtacaatttttaattggacaggtctgcaatgtcagttttaattggggaagtttacaaaataccaaacaaacacagacactttttcatcaggtaagacagcgaattatacgacattattatcagcagcctgaagacaaagtctcagagatggaaaatcatttgggaaatgacttgcagttagtgcaagagagttactataatgtttacttctattttgtttgtgacttaatttatattattttaactattggtacgctgtttacctttcattggatattggttgtctatacattattagttactttgcttgcagtagtagtgccgaaattgactgaaaaatataccaatcgagcaactaaagctgtttctatccaaaataagcaatttttgcagttgttagaaaaatggttcaagggtttagatgagctgcgacgctaccagaataaagttgttttgaaaaaggtggtgggacaacagagtcagaaactagagcagagtgaatatcagcgagataaattgctacattatactagcttagtgtctgcgatatttaatatagctggtcgtgttggtgttccatttattgctggaattttgtttttcaatcatcaggtaaatttaggagcgattctgacagcgggatattttgccaatggaattttttatagtgtagatagttgcgtgaacagatatacgcaattaaaatcaacgaaaactttgcgggatgatctggctaaattgcaaaagtgtttaccagaaaaagggtatgattctttaaaacaaatcgctaccgttcaaataaaaagcttgtcagtacaatatccaaatggtgaaagaattacttatcctgactttgaactgaagaatggtgaaaaggttttattgactggtgattcaggtacaggaaaatcaactttattaaaagttttgttagggcaaattaagccaagtacgggtgaagtaatctattgcgataaaacaggaaaaaagatcaaacctgatttacgtcaattaggttatttggcacaggacttattgatctttcctggcagtattcaagaaaatattactatgtttaagcctaagcttaataaaaaaactgtacaagtgattcataagacggtttttgatagtgatcaagcgcgtttgaaaaatgggatagagacacagcttgatccacaacaggaattgctgtctggtggacagaaacaaaaggtagttttaatgcgggcgttgttgcatgagaagccgattctgtacttagatgaagcaactagtgcaattgatcaacaagcaacgacaaaaatcttccaaaacttaatgcaaagtagagcaacaattttggccgttgcacacaatttaaccgtagaacaacgagcattgtttgatcgtgaagttcacttggagggaaaataatgagtagcaaagaattatttaaacttaatccaattaaattctgtctggctatgggactacagattattgcagcagttggcgaagtagttgtagcttatgtgttaactttgcaatttgatgctgccaaaaatagaaacttgagtttatttttaacttggacattaatccagctgtctagctatgtcatggtattcttattctataatttggcgggaatcatttggcaaaagttgattcaaaattacctgcatttaattcggcaagaactaacagatcattattttgccgatagtcaaaagcatgcggttagtgcagtgcaaaatcggatgactaatgatttgaaactgttacataatgactatttagattcgttccgctatatagtagggatgctagccggtattgtcggtgtagcctttagcttggtgacttttcagtggagtttgttagttgcttgtttaatttttgccgcaattcagatttatttacctaaattactggataagccattacaaaaagctactgaaaaggtatcagtagctaatcgaaagtatttgaagactttaggtgattggttaattggcttatcagaagttcgtcgctatttggctagcgataagctttttaagactattgctgaaaattcaggacgcttggaagcagcaaatattgagaaggaaaaagtagatcaggaattagattatctgaatcaattggcttattcattaggagatgtgctaatctttcttttaactggatttttggtagtgaataattgggctgcttttggtttgattgccagcattggcaacttcaatggagcactatttggttctttgcaaggagttgctaattatggtggaagaatgcgagcaacaaagaaattgcgagaagagattcttgtagctagaaagaaaattcagtctgaacataaaagtaatttagaacaagcggttagtttttcaatccataatttagctatcgattttagaaacggtgaggccgtgactttcccagatttccaagttaaagctggagagaaaattttactaacaggtgattcaggtacaggaaaatcaactttactcaaattgattttaggtgaattgcaagccagtcgcggcaagattcaatactttaatcaaaagggtgaaaagattcaacctgatttagctaaaattggctatttgccgcaagatccagtgttattcccagtaacgattgttgaaaatattacgatgttcaattcaaaactgctaaaccgagttaaatcagctattgaaaaagttcaatttgcaggagatattgctaagttttcggctggcattgagactaagattaaccttgatcaattgaatgtttctggtggtcagaggcagaaaattgttttagctagaagcatggtgcaccagagcaagttgattttgattgatgaggcgacaagtgcaattgatcaggcggctacgatgaaaattttgcgtcagttgactaagacggatgcaacgattgtattcattgctcacaactttaatcaagaaatgcatcaattgtttgatcgtgaaattcatttaaagaaataaaaacaagctcataacctcaaagttataggttatgagcttgttttattatagccaaatttgttcgaaaatatcttctttaaaaccgcaagttaaattactgtcatcaacgactaatggccgcttgattaacttaccattttttgacatcatatctgcagcttcttcaatcgtcattgttggcactttttctttcaaattttctctgcggtaatcttgaccgtgtgtattgaagaaatattttagaccacgatcttgatatttggtcatccattttaccaagtcttcttttttcggtggctgttcaactaaatcttgaaattcgtagttgacctgatggtcatccatccacttgcgtgctttacgtgaggtagagcaacgtttataaccataaaatttaatcattattttccgtccttatttttgtaaaaattttctaaaaaattcaatttcttcatcatttgcgatatcagctagctcgtctttttgatcaacaaagaacacatgaccgcgaggattgtcttcatcaccataggacttgcagatggcgtgaacaccgcgaccgagcaagaagccaaagagggtaaattgcatgtcatgcaaaaaatccttgttagccgtgattaaaaaagtcggcaagaaattgtgattgatatatttttcaacgtcgagttgttcatgatacttgttaactgcatttttagtgaagtaggcgctagccatgccatctaaattgcttggggttaacatgaaggaagcagcacaattcaagccgacagccctaaattttaagttcaatggtttgtaagaaaataacttggcataatctggattagtcaaaatagtgacatactgctcagccatttgaccaccggcgctgtcgccaacgataaaaacgttgttgcgatctagacgatattcttcagcgtgctcatcaacccaatgcatgtagcgatcaacatcgtctaattcatcagggaattccgcgttttctggtgcaagacgatagttgggattgatgaaagcaaaaccgcgcttagctaaacccattccataatattggtagatttctttagtaccataaacccaaccaccgccgtgaatattgatgatgacagggaagggagcttcgtgctttttgggtaaataaacatctaaagtatgccacttttcatctggaccataaggcagattatcaagacgttcaacttcagggatgtcgtgaggcaagccactgtcacgtttggtgtcatgctgatatgcaccatctctaaagtcagtaacaaactttttgattttatctttaagttccataattgttctcttttctagtaattatctatgttaactcaattatactttaattgaatttgaaaaaataaaaacttttttgaaaaatcctcttgcattttaattaacgtttccctataatagtctatgttctgttgaggacgtacaaacatacaagatggtctggtagctcagctggatagagcaacagtcttctaaactgtgggtcgtgggttcgaatctcacccggatcatataatcaagcctgtaagtattgatcttacaggctttttgcataccttaggtatctaaaaggtatctaatgtgctaaatttgatttaaaacttcttcaatttgatcatcagattgctgacgaagttcatcaagcatataggcatatactgaagctgtcatgctcatagaagagtgtcctaatctttttgaaatggcatagagtggaacacctttaaagagtaaaagagcaacgtgagtatgacgcagactgtgaaagtgaaaatgatttttggatatattaagcttcttaagctgcttttttaaggtctgattagccgcagtcgttgtgataattttgccgctttgagtcataaatacaaatttttgatgattggctttaagttgcttcaataaatcaagcaaattctctgagactcgtataactcgtttactactttctgtttttggctccttaattttaccgtcaagataactatatgattttgttactttgataagatgctttttaaagtcaatatctgtccatttcaaagccataatttcgcctattctcatgccagtatatatcgcagtaatgatcatatatctgcttatgtaggtcggcttaatatttgattctagagattcgagtaacttctgcacttctttataatttaaatattgcactttatggctatgtgaatcattccaggttaggttaactctatcggtgaaattattggttataagcttgtcagaaagacaatcgtgaacaaatgcttttatatatctattaagaagtcttacagttgtttttgcatgatttttaccgtagtcgtttaaaaagctttggtatcgttgacgattcattttagttagtttgacattaccaaaatagtttttaacaatagtaattgagtaattgtatcgacgctgggttgtagttgctttacctggtatcttatatgtattagtgtattcttcgtatgcttgtgcaaaggtggggttttggtcagatattttgttatcatctttagcaacttccatttcgttagcccattttctggctgcagatttagttaaaaagccctgttttgttttaaaccgacgcttaccttggtcatcataccaagatacttgtgctcgccacgtagcgcctcttttttcaaaatgtgccatattcattacctcatacgtttacattatttatgcattaattatgcattatgtataaattacttatatgtgacttaatataaactcacctacttaatttgagcaggcgggtgtttttgttaaacttagaatacgcgtggtgctagttaaatcgttttagttaataaaaaagtccaatcttgttagactcgacttgtaaatagtaataatagaaaagagtctgatctgattgaactgccttaagcttaagcgttttagccaccatttacaagttagttttaaagatttagtgataatttgtcggcactggtatcgtttgtatgcaccggctgagtttactcatcggcgaaatattgatcaaattaaaactacggacagtctgattttggctttacttatctggcaagctaagacaggaattgaatcacaaagaagattctgtgaatgtttcaattgtttatcacactcacgttttaatcggcgttcacgtcagctattgcaattgatttatcagatacggcaagaaatgaataaaaaggttgacctgaatggacatttcttgatcattgacagctttccggtacctgtttgccaaccaattcgcaactatcgtgctaaaatttttcgcggttatgccaacattggttataaggccaccaagaaaatttacttctatggtttcaaagttcatgccattgttagcgatgacggttacattcttgattatgtcgtaacaaaagcatcagttcatgatgccaaggagacagttgaactgatggaaaatgcacatccatctaattactatcttcttggcgacgaaggctatttaggcaaagaactgcatcaacagctaaaacaaatgggttatgaactttggacaccatatcgtaaaaatatgacaggagctaaaaagcacaatgatcatcaattgatggctattcgcagaacaattgaaagcgacttttcgcttctgacctattacaatgccgagaacaatcgagcacgtagtctgataggctttcaaagccggttggaaattgcaattttagcttataatttggcttattgtctagaacgatttaactagcaccacgcgtaacttagaatatttattccatgaaatcattcttcaaatctatatttgttaaattcctcttgcacttgaaagtaatcctgtgtacctatacctttagcaaaatctaaccaattagcagtttgaaaatcgttacccaaagcgaaatattgtctgactctttcacgtattaaaaaagaattcgctccgtgttcactgcaactatgagcacaatcatccgttttgtagtctccttgaacatctttgtcgtatatcatatgtcccagttcatgtaggattacgtttttagctttctcgtcgtcataacttgaattaactatcattacgtctggcttattatcttctccaggtatgagtaaacctgggcaatgtagaggagcaaactctaattttatgtttgattctttaagtagccttttaagttcagtgtccataatgcacacctttttctatttttcattgtaaattctctttaaaatgtctctaactagatctttgtcatggtcatcaataggcttaccgtcaaaaaatctagcattatcaatcattttatttaaatcggagtctgtaatttcactgttagtggaggaaggagaagggttattagttcgtccaagcagataatcagtacttgtgttaagtttttccgcaaaggtagctattgttgaaatatcgggttctctttttccttgttcataattagaatatgttggatatgggataccgatttcggaaactgctctttttcttgaccaccccatagcttttcttgcattgataagtctatcgctaaaaatactcataaaaatcctcctaaaagctaaataattatcctatttgactcaattctaaaattaaatattcaatttgaaaataattatatccaaaagggataaacatttattgacatttatccaaaacggcgtattataattcttgttaagaaaaatattcaaactgaataataagaaggtgataatttggttagagcaactaaagaaaatgctggaaagattttaaaaagttatcttagagagcatggaattaagcaaaactatgttgctaaaaaagtaggaatcagtagcgctaattttagcagtcgactaaatggtcgtttaaagtttaatgcagattttgcgctaacagtgtcaaaggctttagatatcgatccagagatttttttgaaataaaattattcaaattggataagttgagaggagcataaagtggagaaagtgtttgaaggatcaaaagtttttttaaatattccagtaggtatagcgagagataaggaattattgaaaaagcccaaaactatcctgttaatgggcgaaataatttcaatgctcaatgtcactggcgagttttttatgagtaataaaaagattagtgaacgattacaagtatctactcgtactgtcaatgattacctcgatattttggaaaagaaaaagctgatcatacgtgaaaaaatagtgaacgatgaaaataatgcaatcatcggtagaaaaatacgtgctggtgcagccctagtgaaatgcatttcactagggtggggaagcccacttcatgagggtagtgaagctcacttcacacccctagtgaagcccacttcacataaaaagaacagagataatagaacaactaatagaacagttaataaatcttcttcttctagtttctccttagaggatcaaagcaacagtattaaaaatcaaaaatccgaagaagaagataaattaaataattctaattcacgaaaagaagagcctcgaagagaaaaggtttataagagattatttcaaattgcaagaatgaacgatcaatggaaaggcacacgtactattccaacgccagatcaaataaggcagctgcgtatgttgttgtaccaatgtgattatctttcgcttgatgcagtactgcagacatttagtgaaaagatgagagcagatcaactatttgaaccgtggaaatacgtattacagttgatgcgagataagatagcagcacaaaagaattatgaaagctggggataaagatgcaagaagatatgtctaacgcattaatcaacattccaagtcttacaagctttgtaaaaagtattgtcaaagaagctgttaaagaagataaaaaagatttaactggcaaaacttggaatatcaatgagtttagaaaatactgttgtcgaggtaagggagataactgggtaagaacctttattttcgatgaatttccagaagtcgattacaagaacggaggctttgtagtaaatcctagaaagacacctgaaggcaaaacaacaattatttttgctaaagaagcttgtgagtggatgcaacaacatcagcatgagattgattggaacgcaaaaatcactagttagcataaatgtatagagattacaaacaaataacgccctacaagtagtagagcgtcatagatttaaaacggattggagaaaaaataatggaattaacaggtaaaaaagaaaattttgatgaattcttagtcaaggtagatgagttaggctatgctattggagacgtactccctaatagctggacattaaacttaactgatgttacaagattgctaaatgaaatgcttagtgagaagcacctcaaggttaaacaagaaactgtaacgacatcggataatttagcagttcaggtcaaaacaattttgcaagatagagatttgcaagtatcagctagtttagatacgatactagattcaaataatcaagttgaatatatgcttaactggtggcagtggcggatcaattgtcaattagcattgatcgaagtaatttcaggattttatgaaaaagcaaatgtagaagactagttagcatttgctagaacagatttgattagggaaataattaaatctgtctgttgatcagttaagtcttctggtagaacatttaatatcttgttttgttgaggtgttaagtcaatttctttagaggtatctactaaagaattgacgctgacgttaaataagtcggctaatttggctgtgttttccttgttaggggtattcacccctgcaagccatttgtagactgtaatcggcttaatattgagcctgtcggcaactttttgaacagataaactactattttgaattaattgtttaagataatcagttctaaatttcaaatctgggtcatcagttttttcagctaattgagataagaaatctttggttggctgatatgaaggatcaagttcatcgggtgcaacatgtaaggctttagcgattttaaccaagttgttttgcggaatggcaccatttcctaaataatagcgattaattgatggaatagagattccagttagcgccgccaagtctcgttgagttaatttttgattgtataaaattcttttgagattggcgctagtaattgcgatgatggattgcttaagtttatctttcatgatatacccctttaaaaatttaaattttatgttgtaaatcattattaatatatcatttttgcgatacttttgtataagaccgcaagatattgataaagaaagccttaattagatggatgtgaggttgtaagaatgaatcttaaaaataaaaaagttatacaagacttgcttaatgacaaaattgatattcaagaaattgaagatagattgtttgtcattgcgtttcttagcatggcagataatcttgaactagatggacaacgacttagtagtaagcagaagctagagttaaacagctatttagcaggggaagcattgggcttaatgggaaacagtccagaagtattaagcaatagaatttatgacccagactatctggcaaaaatgggtaaattgattgagaaagcttttgtagattatatgaatatgtcgggggttcatgatgaataagtatgatttatatccaggaatgataactactcctgcagaattgtctaaaattttcacttggcgatttagatatgatgtgcttggaatgcaaccattggatagcaatagtttttatgttcgtgttaaacaacttaatgatcaatctattgacattaaagctaatcaaaaaattaagtatgctggcgagggaaaatggctagtagtagttgaaaggagctagctatgaaattatttttaggcatatatttggcttactttcttacgagtttgatttggatagcagtagtctttaacaagacagacgcagaagaaaagtatgttaatagagttaccaaagaatgaaatggatcttgaaattgatgatcaaatttttatgtctatgtatcatgaatatttagctcaaggtggtactgaaaaagattttaaagaaaagcaggcagcttatattagtcaagcaatgagtggattggaaagtcttgtgatattaagaatacaagcgataaacagactgtttacaataaaaacgatatttgatataataaataagcaagggctatgtaattgcccgtgcttagcaagttaggcgcaactttatactcaatccccattgatgctactaaagttactcctactgccatttttaatccgttagggtcacctagcggtttttttgtgcttaatgtaaaaattatgtatattattttttgtcttgaaatatcgtaaaaacgatatataatataaatatcaggaaacattttaaaagaggaggagaaaaaaatgattaatcaagttgtaattgacggctacattggaaaagaattggagttaaagacaacccaatctttaaaaaagtatgtagcctttactatttgtcaaaaccgttatagcaagattcaacaagactatattggtgaatggcaccatgtaattgcgtggaataaagtggctgaaaatctcgttgctaaagtacataaaggcttaaaagttattctagctggtgaacaaaggactagaagctttattgataaaaatggtaataaggttgcatatgaatatatctgggttaattcatttgatgttttaacaagtcaaaatgaagagtctacaaaagctattcctcagaattcaaatcaagcaaatgatgaagagccagaagctgaccgtaccattgtggaagcaaacaaaaaagataaattggcagaagaaccttttggaagtcagaaagaagtacaactaacagatgctgatttaccattttaataaagataatgcgattggtgagtattggatgacaaaaaaatcagtaaaaaatagacgctttagcgtattcagagtggaaaaagaagtttatgaaattctgacgatagatgggtaccattactggaatattgacgggttatttataaaaaatccaaaaaattttttgtctctaaagtcttataaatacaatactggatataaaaaagtaactttttatcgagtaagtgagatttatgatcaaatttatttaggctttggatttgaagtaaatcctaaattaggacatcgcaggttattgtgtaaaagaaaatatcctgaatctcatcataggaaaaagccgctaattgatgttagcaagtaagatattatgatcagttcatttatattagaacattttcgatacatagtgatcgcatttggagcggggaatttattcataattattcttatggcaatatcatctttgccaagtttagcaggcacaaggtttgctaacttttttgaaaaattggatgaattagtgacagttctgctatcgattcttggaattattctatggatcatgattttatttatcggatattactggagctatttaatgtaaaactagggcgtaatttaataggtaaaatgcaagttggaatgaatattggttaaaggagttgctcctcttttgaatcaaaaagttgatattcatatatatccctatttttaatactttaatactcaatacttaatacttgcaatgaaagttcgaatctttccgctctaatctagtgaggaaaaatatgtataagttaataacagtcgcagtaggtatttatattgtttattacgtctggcgagcgtattcaaacatgaaaaatttgaagaaaaatatggatgataatcctaaagaactccttattaggtatgatagtcaaattaatgatttgcgaaaacagttaacagaagttaatgaaacaatcgcaagaaatcagggcttcccaccaagtttttccgttaatagggggcttaagaaagccaagaagcaacaagaaaagctactgcaacgaattacacaaaaagaagttgctagaagcaattatttgaaattattgagaagctatcaagaaggaaaaattgataaagcagcattgaagaaatgggtaaacgaaaatcagaggagatgataaacgtgaaaaagtttagcaagtttgctttaactgcgttagctgtgacaggagcaattattgtggcagtagtcgtgacaaatcaagtaaaagaggcaaaatccttagaatgttaatcattaagaaagtcggtacaattattgatttttgatcaataatttagctgttcaactcagctatttcttttaggactggtagacagtccactagtacattgaaaacagaataagcgtcaactatgctctgcaacgggtgtaggacgtgtgcatgactattgagccgactcaataggatttgtaagacagagaattgaaggcacaacgggtggaagaagaaagaatcacacctgccgagatggagatagccgtccatcaataaagattactattatttttggcttgatgataagtcttagtttgaacgaaatttaaaatttaaagtaatagtaatagctgtaataggctactaaaagataagcatacattctttttggctgttttaacatgtgaataccttgatgaaaaactcaagagtaaataaaaagtcggagtgtgatcaagaacagtaagtgagtcaataaacttaattatttaagtgttgtagtaactgaagggcaagaaagagtctttgattaggattgataagaggatagcttgcggaatgcgtgaagcgagaggttagagataggtgaagctatctgctacgtactgtacaaaaacttacagtttgatggctaactaagaaaccatcatcgttatcggtcatagcgtaaaaccgttggtaattaaaaagagatcacaaactataataatagggaaattaagatgaaaagttatgaataattttgattacgttgatcgattggttaatgtaatgaaaaaattagatgttacaagattaacggcggatgagtatgtccgttatcgcaatcaattagcgagggaataccctaaagattttacacctttaaggcaaaaagaaacattagcattacgtgcattactttcccgaaagaatgatcaagtgaagttatcttttacatatgatcgttttggaagatgtacgcaagagtatattttaaaataataaaaattaacggatatcccgctgctataatgttgcgtatgtagtataatgaaagcaggtgagagcggggaaaagttagcgagtaatttaagctgaattatttgaaggaaagaggagcaaattatgtttatgaaaaagaatgtattagtaagtttatctgttgcaacattgttatcagttggagcagtaggtgttaatgaaataaatggtgttgctaataatacaaatgttgtacaagcagcagtaaaaaatggcaagcttactcataatgcctatatttataagagtaatggcaatcgttatggcaagaaagtattgaagaagggcaaaacagttaagattctcggtacaaagaagatttatggtaagaaatactaccgcattggtaagaatcaatacgttaaggttgctaattttgctaagaagaccagtaaagctaatacggctagcggtcaatattatttaacccacaatgcttatgtttataacgctgaaggcaaaagaatcaagggcactgatactttaaagaagaaccatgtctttactgtagttggtgttaagacaattaatggcaaggattacttgtccttaggcaatggtcaatatgtgaaagctgcaaatgcacaatcaacctcggctgaaggtgctaataaccaagtaaacaataatgctacggatactgcagtaggtaatactactgataaatctacttcaaattcaaataatagtagtgaaaataaacataatagctctgattctaaatctgcagctgaaaaagctggggaaaaaggttatatttactttactgatgatcaggtagcacaaattcaaagctatttgtggcaaagaatcaatgcttaccgtcaaagtaaaggttatccagcttataagactaatccagaactaactagttttgtaaatcgggtaatgcaaaagggtacacctgagtacaatgttgctggttatggtaacggtactattcaaaatactgataccttaggacaatttttgccaaaattaaaagcattaggaatggatagtgctagaagtatgactgatttagatgctttcgcatatggtaatctgaagcaatggttccttgatttaaaggcaaaagatcctaaaaaggttgcagatgaaatctttaatgtttataccaaacaagaagatggtatggacttaagaactcttgaaggacataaagataaatacgcttatgctgctttgaaagttaaatataatggtgagggagattatatcgatcactgtttggaattaaactttaccgttgtaggaagttattcaccagaatggattaaggcttgggaagctgctaagtagaaattagaaataaaggttaattagttatgctaattgcctttttttgttcctaaaaatgaaaataaaaaaaagtagattagctattaatcaacagcgaaaaagtgataaaaagaaaaaaattggtacaatagtagctattgttgcactaattttaatcggggttgcgatttactgtattgcaaactttaatcatcttcaaggaaaagctgctaactatgtagcaactaatcatttgtcgagtcaaagaaaaaacaaacagaagaaaaagccaagttttaatatgaaggctgtccaacctgtatcacctcaatctcttgccaatgcatatcagcatagaagagattatcgagctgtaggacagatagcaataagagatcataatgttctattaaatatctatcgtggagttggtaatgtggaactgaacttaggtgcaggaacaatgaaccaatatcaaaagatgggtgaaggaaactacgctttagcaggtcataatatggatgatgggcgttcgttctttagcccattatatactgcaaaggtcagaggaaatttacctaatggaacaacaatcttactaacagattataagaaagtttattattacaagatcacatcttcacaatttatttcagtttataatttaagattagcttggaataataaagagtttaagaaaaaaccagtgatatcattgtttacttgtgactggacaggtcaaggcagactttttattcgtggtaaatacactggttcacaagattataagggagcttctaagtatgttagaggctcctttaatttttagaaaggaaaatgttatggcaaaacaagtttttgtagatttcgaattaccagaagctatgcttgctgatacaaataaaattattaaagagaagtttcctgcatggctagtagatagaaaagataaccgagtagcctcagttcgaattctgtgggctggctggttattccttaagtattcggaaggtttggctagcaagtatgatggacgttttccatatgtagcatatactccttatacagcggtagatagaccttatgcttttcaaaccgtaatgttggaaagtgaatatattgatgcaatggaaagaatgagtcgtttgtatccagatgtctttgaagataagactaaggataagaattatttcttggcaattcttggttatgcttgcttaagagagttgtatgacaataatattgaattacactatgatacagaaaaagctaatgatctcgctgatagtgaaaatgcacaacttgattatgcatggttagaagatggtacaaataaaccattttctatcaaaatcaagcaattatcaaaagacaagtaattgccaataattgtatattattagaaaacacctacatatgaatcaatgttttgatttgtgacattgacaaaaatgcaggtgttttttttgttaaattaaggaggaatagccttgaaaaagctatcaaaaaagcaaactagagaattgctatctgcattaggtgtaacagcaactctaggtagtgtgggcgtaggtctagcagtcgcaaaccataatgcgaaccctaatattgttaaggctgatgcagcagctgatgtgaaatatgtgagtgatgctacttttaaaaagggatcagatattgcttttgatatttactaccaagttccatacaatgtagatctaaagaaattggttcttttcgataaattggagccagtgtttactcataataaaaccagagtttttgatggtaacactgatgttactgatcaatttacggcagattttgataaggggacaaatacaaccaatatgacggctaagaagcctcaagattgggtaggtaagaagttaagcatgcgaattgaaaccacgttacaaaagaatgctaacttagacaggtatttggataagaatacgaatcaatacaacattcctaatgttggtcaaatgatctataacgatgaaaagatcaagaccccacctgtttatgttcatacaccgaatgatgaagaacctactgcaattaagcaagtagaggataagaacggtcaatatggtgaaaaagccaagcatgacgctggtgatgaattccattatcgagttcaatattcaattcctgaaaatggtaaagacattagtaatgttgttttctatgacgatttggaaaaggttcttgatcttgaagacgttaagatcaccgatgacaagggaaatgaagttactaaagaaggggatttaaaacttgataaagataaagaaagttttacttggcaaccttctaaagaatatctaactcaaatgccaaagcatatctacactgcagatattactgtcaagctgaagaccgatgcagatttaagtggttacttgaataaagcaacaaagaattacgaaattcctaatgttgctcatatgaagtacaacaataaagatattccttcaaatcctgttaaggttgaaactccacctccagccgaaaataaggtagttaagagtgttcagggactatcaggttcctatcatgaagataaagacaatgttgaggttggcaaggactatacttataagattgactatactgcaggtgaagggcaacatttaaccgatgttgagtttaccgataagttagaagatgtccttgaccttgaaaaggtagttgttaagaatgccgatggtaaagatattaccactgaacaaggtacacttaagcttgatgaaaagaatgaaagctttaactggcaaccaaatgctgacttggttaaggttatgcctggcaagaaatatacagttgaagttactgccaaagtcaaagacaatgcagacttacaaaagtatattaaaaacaataccatcgaaattccaaatacggctcactttaaggcgaatggtaaagacaccccatcaaatactccagttgtgaccccaaaggtagaggaacctaagacgcataagggaattgttaagaatcctgcagattgggcgaaattctttggcaataagtctgaaacttcctcaggacaagactctgatggtgatggtgcattgccaaaggactatcaaaaggctcaggaatacgttaaagtcgatccaaatactggtgtatggagcaaggcaaatgacaaggtaacagataagcaatatgaagaagcagtcaaaattcttcaaacgccttataagaaccctgtaaagtcctcatctcaaaatgctagtgaaattactactaagtcaccaacctctaaagaagacttaaaagaaattattaattcttcaacagtagatagcaatcaggcttcacgtggtgatgctgtagattatctgttgacgtttgatattggtaattctcaaaatatgaagtcacttgtattaagtgatgatttggaaaatgtgcttgacttaaagaatgttgtcatcattgatagtgatggcaataatgtaactaatgaaggtaagctagttacttcagatgaagatgaaagctttacttggactgctaatgatccagctaaattctcacgtaagaaactatatgttgcaattgcttctaacattaaaccaaatgcagatgtatcaagctatgacaatagcggtattcctaatacaggtcatatgcaaattaacggtcaagatattccaactaatgttgttcatactacgcttaatggtgatccaaagaaccctgaagatcctaagaaggataagcctaacgatccttctaaaccagatggtaagaccccagacccatatggaaacttggtaaataagcaagttaaggctgaatcaggtcaatggggtgaatcagataaggttcaagaaggcaaagactttgactacaaggttgaatacactgtcggtgataaacaagatgttaaatctgttgaatttgcggacgacttagaagatgtccttgatcttgaaaaggtaaccattactgatgctgatgggaatgatgtaactagccaaggtgaacttacgcttgataagaatactgaaaagttctcatggaagcctaaggctgatttagtaggcaagatgggcggtaagaaatttacagctaacatcactgctaagttaaagaaggattctaaggttaatggtgaagtaccaaacactgctgatatgacagtaaatggcaaagacgttaagtctaatacagttaatgtcattccaccacaagcagataagaagtcaccaagcaacgtcaacaatcctaagaatcctacgaatagcacagagaatcctaacaatccaaataatccaggaacaaacaatccaggatcaaataaccctattacaggtaaaaatggattcttacctagaactggtcactttatgatgcaacatgcgggatggtttattgccgcattagttgccattgcaggtggaattggtagttatctttacaagacaaatgatgatttcaaagaaaagatcactggaatcaagaataaattgattaagaagtaaaggagagatccaagtgttagacgctacaaaattaaaaaatattaaggtaatcggcttagcaggagcggctctagcaatcgtttcattaggatttgctacaagtacgaccgttaaggctgataatgcacaaatgcaagatttacctaaaggagttaaagctgaaggtgctaaaattccaggacagtatggttttagacctaaggttatgaaaggaattactaaggtaacgccttttggtggcagttcggctgactgggcaacctcatctacaaatacagaaggtgagcagcattcttgggacgcttttagattgaaaggtaatgagaatctaaaagggaaaatcggtatttattactctaatgtagggaatgatccagtgtctgggaaaacaatcgatatgaaagtaactttaaacgattggaagattaatgcctataaatgggatcattctactgatccaattaaaaaagtcgctttagaaaatccgtatgcagcctttggcgttgatgattttgaaattttcactcctggtgatggtgccttagcttatcgtattgacttcattgaccatgatacagggaagccagttaagttaaatactcaaatgactttccttgatattgatggtaaccaatgggtcggttttgatacttcaacttttagcaagattgataatgtttattatggtgatcaagaaggtaaaacttggttatcatatatggataaaatgggcaaaaaatatatttattctgatgccaatcttcaccatgaagccctacctgatgggtcaggtacagtaaggtcaaaagatttgtatggtggaattacgacttctgtctcaaatgctgatcatatgaacgtcacctgggtatacggtactaatacaggtaagcatgctattgaatcacaaaatgaattactagcaaccaatggttactggcaattaaatgattctaactatcaagcagatgcagataaaaataaaattggtacaattgcttcatcagtttggaatggtaattttaatcatgcgtacttaaaatttggtggcagagctattcttccagataaaccattagatcctaagaagtttgtgtcagataaagatgaaggtactaatgttcctagtgaaattggtggtattaaatctgtaacccacgatatgctagagaatcgttatgaacaataccactatcaaattgttcattctgtaccagatgtacgtgatagatttaaatatacccaatacagaattacagataatcttgacaatctcttaaatatcgatactggctctattcgagtttataatcgtgaaaatcaagatgttacttacatgttcactgtaaccttgtcaaatggcaacaatctttcggtaattgctaagggcgatacattggctcttgatgatttctatcgtgaaacttataagatcagttttgatgctacagttaaaccaggtaagagtctaaaggatcacgctgatcctaagcataaaaatcaagccgtaattgataaccagtcaaaggtaattactgataatggttcagctgattctaacattgttacaacaaatattccgtttactaaagaaaaggatgaaaaatttgtttctaatgatggacttggtaatactaagtcacttgtagatgtagactttggtaagaagtatacataccgtgttgaagcaacagttccagataacgttgacattgatagtttggctattaaagatactattgaatcagacgttcaaaatatcaagggcgttaaagtttatgattatgatgataaggatgcagcaggtaatgctaaggaaatcaccgatcaaggtaagctagaaattgataacaagactggtaagatttcttggactgcaaatgatccagcaaactggcacggtaagcatttgaagatgtttattgatactactttgattaatactcctaagcttcttgactacttgaataaggataccagcatgattgaaattccaaatgaagctcatttcttattcaataaggaagatattccaagtaatattactcacgtatcgccaaagacaccaaaggcttctgcagataagaagatcgaggtttcaggcgactataccagtgaagatgttgacccaacaggagatggggacaagaataaaaacactgataaagacaacaagcgtgaaactgaaacattacctaatgacaaagacgaataacgtataaaggattagatgaaatggtgagaaagtctaatccttctttttctttcgggtgagatggtgggcaatagttaaggaggaaaaatggttcttagcaaacaagacaagtccattttacgcaagctacataattcccaaggcttaacacaaaaggcttgggaagaaaaaattatggttgagtttgtgcaagatttgatctcaggcactaaaagcgcatataaagatgcagttttagaagtcgcaggtaaaaaagaattatccgagcagctggagaaactacagattgctgaacctgataagactttaaatgataaggttacgtcatcaaaagatgataataagcctacaagtgattttaatgggacaagtaaaagtatttagtttagctaactaaatgctttttttatacaaggaggattaacaatgtttttagctgtttataccaaattgacctacttattttggagcggcttaatcggtactcaggcttttttaaacgaacatccagttttacttagtgtttggagcaatattaataaggctactggtagtaccgaaaagaacctgaagagtatcgccaaaggtctgttcattgttgttattatcttggctggtattcttttcgcttttggtaacagaatgtcgcaaaatgcaaagcaattattgatgtatgcactggtaggtgttgccattgttgctttagctgcaagtttagtaccatcattcgcaaatatgtttggttggaatgctagatagttagttttgtaagtaaggtgaagtaagtttaacttactgggttgatggtgggcgttaaagaaggagagaagattatgctattagttacctttgataaggtaccaaaaggggcgaaaaaatattttcaatttaagcataaattaagtagaaaatcgcctgaattagacattaaaactgcagatgatgcagttaaggactatgcaaagagcttagaagaagctgattctaatgttacatttactatctttgatgatgaagatgaggatcgtgaagagagcagctttgaagcacaaattttacctgaggatcaagacgggggtattttaaacttgattgatcgtgatttagagaatgaaaatttaactcgtgatcaagaagaaacagtaacaacactaaaggatcaaatctttaatgaacttgaacctagtttgagtgatgatgaagaggacttaaataaagacaatgggttcatgtttaataataatcaaattctagattcagatgatgaagtgcgtgatgaaatacctcctgaaaatgatgtaaatgatgagactgaggataacagtccaacagaagaatcaaatagtaatgccgcaaccaatcctagtttgaataatgttcctacacaattacctgaagaggttgatgctttaccaattcaagcaggtcaaacaactgaaacagaaactagtcgcagtgaagtaattagctatggcaaatataccgatgccaatgatattcttgaccgtttgccaagaggatatgataaaaatcaatttgctctaaataatattcgtcatgatttaggctatttagataatcctaaagatcaatatgatcaagcgttgaatgataaaattgatcaggcgttaagagattattcaatgcaagatattcaacgtgtatatgatgaaggtttagcgaaatcaaaggctgcaattgtagatagattaaaggaagcatataacagagttactaaagagtcactagataaaattgttgaagacagaacagcggcacagattcaacaactggtagttaaagcaactcatcaaaagcaaaataatcaatctgacttgagtaaattaaaagaaaacaaggcactagaactaaagactaatgatgaagccgcattagctgagtataagaagcaattagaagaaaaacgcaatatagctttgaaaaattttaatgatcaagaagagcttaaaactcgtaatgctaatgaacaaattgatgagcaattaaaggctgataaagctaaagtagaacgtgttgcgcgtgatgaagaagtacaaaaacgaaattctgagttagatgatagtagaacaaccattagtaatgattttgatcatgcagttagaaataactatgacaagaataatgatttatttgaagacaatttaaagaaggttcaagaaaaagttcgattagctaaagaacaaataaatcaacaaaagctacttgatcaagaaaaggctgaagaaaagcgtcagcgagaagcagaagctgctcgcaaagaacgtgaacttgatttaaagcaaaaagcaattgagcagaatgagtctttggcaaaattgcaacaagaaaatatggcaaagttgcctgaggaatttgcgaaagcaattgctgcagcaattactcaaaataatttagaaaatcctaacgtaaaaattactttaaataatgatggaaagaatgctttagtgcctgtgccacatgttgatggtgaaatagtagacttagatgatactaagaaaaatgatgcaccaattgattctgaatcaaatgaagaagattcagagttaaagccagaaaccgaggataacagtcctaagaaacatcactataaatctgaaattatctcattagtttgccttgcagctgcgactttgggtggtacatgggcttatactaataaccattctaataatgaacaaaaagcttcaattgaacgatcaagttcaaactcgcatgtcaagaaaaacaagcaatcaagtagtaagcaatctgctaaaaaagatattgctaaaaatcaaaaaactaatgctaaatcaaagactaaatctactccaacttatttaactaggtcacaagctattttaaaacaatatcgtgaaactaagacttgggcacaaaagagagatatgctagatggtttattagggcaaggtgacgcaagaaatttaaagaagattgctacaatatattcaaatccaattgctagtttgtacagtgccattgctaatgaagacaaagctcagacaagggatatttggctaagtttaactgatgatcagcgaacagaaatttccaactcagctaaaaaagctgtcgcattggctttctatgatattgctgattggcaagatgggtggttagctagatatgcgtactaaaaaaagaagatcacgaataaatctaaaaaatgctagaaacaaggaaaagaatcttgtaaaaaagggcttgtatcaagttgaaagacaattacatcgtcccaaaaatgaaaacaagcagtctagcaatattaattttaattatacgaagctgataacaacgttggttataggaatttttatctttctagtaataatgtggttattaggagcattccataatgtcatgttacaaactaaaagtaaaaactataacttattcacgaatggtctcgatttagataaagcgggattagctggcttgaatttctttaagacacagttgaagcccatggaaattttagaggtatttgctgctagcgtaattattggtggattgttaagtcaaaaatttcactttgaaagtcaaaaagtcgctcatgggcaaaagggaaatgcccgttttactacagttaaggaattagaagacacctatgtaaaagtgcctgatcatagtcaaccagggttagatcctaaaaagcctagctttaatggttttggtgggtttcccattgctcacattaatagattaggattaaccccaaaatttccatttattactaaacatggctattatttcattgatacaagtacagttcataatttgattgttggtacttcacggtctggtaaaggtgaaactactatattagaacaaatcgacctagtaagtagggctgaaaaacaatcgtcactagtcgtgaatgatcctaaaggagaactgtatgttgcttctgtaaatacgttgaggaagcgtggctatgatgtttatgaattaaatttagatgacccaaacaaaggaatcgcatttaatccgctacagttaatcattagaagctgggagcagggtgatgttgaaggagcaatgcaattagttaactcaattacctactcgctttattttgataaacaagcaggtcaaaacaagtgggttaatgacggcgcacaatcagctgttaatggtatgattattgatattaagcaaaacaaaatttaataaatgtcgatatatcaatgcttaacagcaataaatcggcagtaataactatagtgaagagactttttacggaaaaattacgtaaaaagctctttttatatatccaatttgttgatcgattccgcaacatgctcttcattttcctttgtaaagtgagagtaagtatccatggttgttgaagcttttttatgaccgagcaagtattgtatatctttaatgtttgcattattttttctattatttagtaaagtagccagtgtgtgtctaaagccatgaggagtgattcttcgtagcggatagttgttatagagcgtcgtaatccaatgatctggtgcgctacgctcataaaaatcgccattatctttgtggaagataaaatcattgccttttttatagattgtttcttctttatactcctttagtactatagccaactgatctgataaggggactttgcgaacggacgcaggtgttttggtaggaccatagattttgttgccattttcatctgtactgatagaatgctgaataaaaatttccttgtttttgaagtcgatatttttccactttaaagccagtgcctcacctgggcgacagcctaaattacccactgtcataaagtaaacgtaatatttctctttatactttttggcacattcaagaaatgttttcaattcgcttaaactatagaagttattagcagggtgcttactttttgccttcgtttttttaggcatcacaattttatcaaaagggtctctgtcgcaccaatcacgtagaatagcatacttaattactctgtgtaataagtttaaaatagaacggtaattaatatgagtttccgccaatttagtagcaaagctttgtaagtggttaatatcgataccgtcgatatatacgcctccaaattctttctctatgttgttcttccaattagatttccgagttcttagcgtagacccacgtacatcggctctataaacttctagccaaatctcatatacttcttgaaccgtttttcggttttctttctgttctttcttatgagtaaacttactaggaccctcttcttttagtttggtcttagctgcttccgcttctttgtagctgtcaaagccctggcgagatggcttaactgccttaccggtttctggatcagttccaatatacgttttaaatccgtacttgaccttgcccgacttcaatttgtacttgtagatctcattgtcttttctacgaggcatatatcatcatcctttcaaactaacgttctaaccaactgtgtaataaatcctgcttacctgaatagggtaggcaggatttttgttttctattcgtttttgaaccagttcgctgattgtcttaaagcaacccagtgaccacgccagccaccgtatacacgccatgggtagtcatgaccggaatacataaccttcaagtctgatcctttctcaatgtaagtcttatgagttaacttactttgatacatataacgtccaaccttgaccttatatattggtgtttccttggttacctttacccagtgccagtggtgtgagtacttgctaatggcttgtacttgtgttgaatgactaggtgcgataactgcaccagtaccgctggcaagcattacagatgccaatgcagctactaaaaatctatgtttcatttttaagccttctttactttggtaaatgatccatagcgtattgaacttgttctggggtgaaaccctcgccaccatcatcaacactgccacttaattgatcttgtacgtctgcacgagataagtgttcggtcttttcatattccttggcacacttcaaagcattttcattccagttaacttgaatgtggttaacagcatattcaccagcagcttgtgtaaaaccttcaccgtcttttgaagttaattggtcaagcaagccagccttactcattggttggtcttcgttgtattcctctgctgtggctaaagcgttcttatattcttctggaacctttggctttgattccttaggctttgactccttagattgagtgcttgattcagttttagcagacttcttatgcgatgccggtttcttcttggcagtttgctctgtctttgctgaaccgctgtcagaatcatcatcgtcatcatcacttaaagcaccgccagcgataaagattgcaacaatcacgatgataacccagacccaccagcgcttataccaaggtttcttttctttgacgacataggttttgccatcttcaccttttatttcctttgccatttctatatcctccataaactaggcacgaagtttaacgtcattggtgccaattaccctggacgaattattcacaatacttttctagttcttccttaacttgaaaataatctttagttcccagactgtcagccaagttaacgtagttgatattgatggcatcatagccttgatttatatagctctttatttcttggtgaatcatgaatttgttggcttcatgttcactgatagctcttgaccttaaattgtgcttataactgccaagaacttccttgtcgtgttcgtagtgtcctatctcatgaaggataaccttttcagtttcctcatcgcttagattctcattaacaataatgtagtcttttttgtttcccttagttctgactagatatcctttaccgtgaataggcaaataagcaactcccaaataatttcttttaagtaatcttttcaaattactatccatataaaacacctacttgtcagcgtatagtccttttaagaaagttgtgagaagttccttgtcatgttcatcgaatggcttgccgttataactgcggacgttgttaagcatttcagccaagtcatcagaggataaattggatggattaggctctgggtcgtcagtcttgcccattaagtaatcatttgttgtattaaataaagtagaaatagcgccaatagtgtttatatctggctctcttttaccatattcataatttgcataagtagttaatggaagatacagtctgttagcaacgtatgttttagtccagcctgcattttctcgcattgtctttagtcgattaccgaatacactcataactgcacctctttgttttcttctctttctgagtatattgtaaattcttatttactatttgaaaatatttcttgtcaaaaagtaaagaaaaatgttgactcttctcaaaatgggtagtaatatataactgtaatcgagttacacgaaatgagaagaaaggaaatggtcggatggcaagtgtcttgaaagacaacgcaagagcattggctaagcaatacttgcgtgatcatggcattaagcagagctggcttgctgataaattgagaatcagtgagcctacactaagcggaagacttaatggaagatataagtttgatgctgactttgcggtagctttttccaaagcattaggtatctcaccagatatttttttgaaataaagttacccgttttgagaagaaaaggagtgcaaaaatggaagaactaatgaaagttcaagtcaaaaacgatcgtcaacttgttagtgcaagagacttacataaaggtcttggactaaaaggaagatttagcagatggttcaaaactaattcagaactattcactgaaaatgaggatttttacaagtgtacatcaagtacggttgttaacaacggcgctgttcgtgagttagatgattatttattaaccattgaaatggctaagcaattagcaatgatggcaagaacagaaaagtcaaagctttatagagaatatttcctagacctagagcgtaaatggaacagcccagaaatggttatgcatagagcattggaattttcaaatgctcgaatcaaacaactcaaattagaaaacaaaaacttgagtatccaactcgaagaaagtaacaaaaaggccagttatctcgatgtgatccttggcactcctgatctactagcaactactcaaatcgcagcagattacggatacagtgcaatggcatttaacaagcttctgaaatctgttggtattcagcataaggtcaacggtcaatggatcctttacaaggcatacatgggtaaaggttacgtagcaagtaaggcattcacttttcaagatcatcgtggcagagatcgaagcagaacgacaacttattggacgcaagcaggtagaaaacttatctacgacgttctaaaagataacgacattttgccactgattgaacgtgacgacattgcataggaggtgattgaaatgaattgctacaaaaacatacgtgaagaacttgaagcactcaatgaacttaataattcaaaaacagagtttggaatggttaaagagttcgatggcaacggtggtgttacacgtccagcaactatcaaagatcttcaagatctcaacagtgaaattatcgcaagcatctgtgatcaacttggaatgagtgacatctgtctaggaggtaataaaaaatgacaattctagcagctatgtccactaaagaattgtggtcgaagttatgcgacttgcttattcaaagaatggcactcgatatcactaaggaagaatgggaaaagttaacagagcaaaccaacaagatcgatgctgaattgaagcgtcgtggtgaattacttagttaggggtgtaaatcatggatttactgacaagcaagaaatgatggcaaagctgaaaatcagccggtcgacattgatgagacgtacaagagattgtgaacatagtccctacaaaaaagcagttattcatgacggagcacgaagattgtattaccgcctagaattgtgggacaagttcatggaatacagaactgataagtattacgaagaaatttacggaatcgaatcaattcgagacaggagcgtgatctaaatggaaaagtttagtccagagcaacgtgaagaagtcagaaagattgttagagaagaaataaaaaagccaacatgcaaagcatatcagcttcaaaagttgccgagattactaaaaaagaaattgaaaagatgggagccgaatttggctctgataccacgatctattaagaaggtcagcaatgaaaaatttatattttattttgattttaacaataagtgctattgctatagtgcttgatcgaaaagtgatcaaaaagcaaacaggttttgcattaagctggccatattatttgtacgttttgttaattgatcttactgtatgcgttcttttttacatcatttaaaagattaacagattcattattaatgtgtttggtgatcgaaaaccaggcgcttttatcatcaatttgcgaaagctttaaccagtcttgcattagtttttgataatcgggtgaaagatatggtagcaacttagaaccgctttttacaaattgatttctggcgttggcttttaattgccagccacccgtttgctcatatgtattaagaacgttagcagctgcaacgaaatttgtaactaaatcattcaaagtggaaattttatcttgtgaattttgaaaatgtttagttttaatttctaattctctccacttattactatgcacattgttaacgatagttactatgacgggagaaattatagcagcaatagcaatcacggcagttatagtatcggcatcaaattttatattaaatcacctccttattgaaggctgatttaattgtagcagattgaaggtgataaacgatgcagcttctagacgaagaaaatttaactaagtttgtgagatccattgtgatctcgatgaaaccagaacttaaatcaaatctagataaaaaagacgtgaaaaagataatcgagctgtcctcacgtgagtggctcaatgttggtgagtcagcaaagtaccttggagttagcgatacaactttcagaagctggcgtaaaaagtacaaaattccgtctcggacaattgaagggatcacacgatggaaaaagtcggatttagataaattttggaaaactcgtggagtgaaaggttacttatagaaaaatgactaaaaaggaaattgaaagaaagtatggaaaaacaaagctggatcacgcactgagttacttctgcatggcattcgagaagatccttgagtttctatcaatcatcttcgtaccacttctagtggttcagcagaccgtactgtatggcgagaaccatccagacgtagttttgccagcattatcaatcgtaacggctttagtaattgtaattggtgcattagtcattaagcacaacaagaaataggaggaaacatgaaattatggaacagatttttaaatactttgtatctcgtagacaagcccatttccttagcgctgtccaacaaaattgccttgctaatagcaattgtttgcatgttgctagcgggagcttttctgaacttccagcctacatcaagagttttttaggcataaaaaaagccctttagctttgcagagctaaagggacaaagaaaaatatctttaaaccaaaaagtaactaaggagattataccacaatgctttactcacaagaacaaattaatcgcaagaaggaattagaagagcttgaaatacaagcagaaaatgaccctgacacattagttgttcagttgcctgaaggccgtgaggctttaattggcaaatctgctgacgacttcgtaaacggctataaatctgcagctcaatttcttaaaggacgtttaaatcattacaacggagatttaaacaagttagcagatgaaatggactacaacgatgtttcacctaaccattttgattttattttagatcttagcaactacggtgatgatcttttgaagtttatcgaagattcttataattgccaaaaattaaccagttatttaggtatggaggagtactaatcatgaacgaaaatcaattaattaaattagatgaaaaggctgtagcattcccagtcaactttgcacctgcacaaattgacttcagtggatataaccaaatgaaagatcaaattgatcagttacatgaaagtcttgaaaactatgatgtaacgcaagacaacctaaaagacgctaagtctacccgcgcaaagctaaataagcttacaaaagcaattaaggcacgcaaagttgaaattaaaaagaaagctgaagcgccagttaaagattttaacgataaagtggaatcgttagtggctaaaattgacgattcaagcgcaaaaattagtgctggtatcaaagtatatgaagataaggcaaaagccgaaagacacgaaaataatttagagcacactaagacgatgtgtgaatttgctgaaattgatcctacaaaaattaaatatcaatcaagctgggacaacaaatcctacagcaaaactaagtttgaaactgaagtcgatcaacaaattgctttgattcagcaagaacaagctcaacttgctgacaacatcaagatcatcagtgaaaaagctgaaagcttaggtttgcccgctgatcactggatcaaagcactagataataatcctttgtcattcgtacttaatgcaatgtccgaatacaaggaagacctagatgccgtctctgaagctcaaaagaaaaccaagttgaatgaacttaacaaccttaaaaagcaaggagataagtacgttgatcctgaaactggtgagatcaaagaaaaggtgatctcacttaagttggaagtcaagggtactccatggcaaatgaagcagctacaaagtttcctaaaggacaacggtattgaatatcaaggattggagggctaatcatgcaattattagaaagcccagccgactggattggacaaatttgcttcaaagctatctcaggattgaagccagaagatgcattgaaggcaaaactggctttgatgagtgcatttgttaatgttcaaagaaagctgcaacagccaagtaaagataaacaaggttatggctataaatatgctgacttgaacggagttatcaaagctatccaagaagcaagttcagatgaggacatcgcttatattcagcaaccagtaaccgatggtggcaagaccggtattcataactacttgcttaatagtaaaggtgcgatcttcgacttcggttcttatatgttggacatcggcagtcctaatcctcaggaatacggtaaggcacttacttacgctcgtagatattcaatcagcgctatctacggcatcgcttctgaagacgacactgatgctaaggagtttaactctaagcctgactacatgactcctaaggagcttaaaggcatgacaattaattatgatggcaagcgtaaagacttaactgaagtgtttgcaatggctatggctggtgatgagttagcaaagcaagtaatcaaagacaaaggcaattcagttaatgcgaagattgctattaagagtatcagcgctatttatgagttctctaagggcttacttaaggatcgtgataaagaaaagtcaaaacaagatgccgaagatcaaaaaatcaaagaaattgttgatggcaagaaagattcaactaagaagaaagatccatttgcaaagctaggtgagtaaaatgaatcaaccaagttattactcaataatgccagcatatgttagatatgataaagatcttaaacctaatgaaaagcttctttatagtgaaataactgccttatctaacaagtttggttattgcacggcttcaaacaattactttgctccactctatgatgtcagtaaagaaacggtatcacgttggataagtcatcttaaaaagaaaggctatattcaagtagaaataattagagctgcagataaaacagtccagcaacgtaggatatacgtttctgtggaaggggaggtattgacaaaaagatcaatagggtattgtcaaaaagatcaagaccctattgacgaaaatgtcaaagagaatattacaagagataatactacaagtaataatattaattcttcttctaataaatcgaaaccctcccctcagaatgaaactgtggataactctaaagacaaatcagaagaagaagaaacaaaaataaattcaagaatgaataaattatggttcactatcagaaattacaataagacattcaatcagcatcttagacctacactaagacaacttaaacaaatcagattaaaagtttctatgttatctgatgatgactttgaaagtcttagcaaagtatatgatcagcgtgtttcagcatacttggtgaataacccaataggctacttgataacaatgctgaatgatgaaatcaagattgagaggcattacaagaaatgaatagacttagaaaattaatcacgtcagccgaccagctagttgacggaaaaaagtactggttgcaatccgaattttctcttacgaggtacgaatgcagattttgggaagttgacgagcatacagcatggttcactacctatgcgccgcatgctaggtttatcggcttaaccgagttgcttagaaacaacggagatattccgttttaggagctaaaagatgaaaaattcaaagtattggcatgatgagccagttttccaaaataggacaccagaatatttctatggctataaatgcccttattgtggtgctaagttaaagccaattgatgaaattacgctcctttgtaacacatgcaataggttttggtttttccaccatttgcaagaaaagggaacagaagactggtaaaagtaaaaggagttaaagaaatgacagataaagaaaaaagtaatgattgaggggtgaagattatgaaagttaaattactctggtctcattttttgcctgatttggataaaaagattaatgagtttattcaaggtaaaaaaatcatcgatattaaatttacggaggtggtttcggacgactacggtaagggcgattggtccgcactagtgatgtatgaagaaaaaagaaacagacactttaaacaaaaggaatttaatatttctgatggcgaggaccccaacgaattcataaaagttcatgatgttgttaatgcagtaacccttaaagatgagaataacgagctagtaacagtagtaatttatgaggatgaagaaaatagcagataaagcagacaaatgaccggcttgtagaaagaaatcatgatcttactagaactttgaagatcatgatggaaattaaaagcgataagtagcatatgaacagttacaggaagagctttacaagaggagcataaaaatgaaaataactgatagacaaatggtaattgactatttaacttctgctgcacttgtatctagtatgaaagaaatagaaatagataatcaaaaactaactagacaagatcaataagcggttgcaattgacttgattaatagagctttagttcttttagatgaaaatggtttgataccttttcttgaaaatattgatgctaagaaaaacagaactgatttcttaatgaatcttgctatgaggtcttttaattttgttaacaataatgaagaatttattagccctgatgaagaagaacatgaaagtcacgatttatgatggcgactggcggggatgcacttgttgactatgtgaaagcacatcatgctcttgtgcctgtcgactttgatcacaagtattcgaacatgagtgattacttgaagcaaaatatggaggattactaatgcaagcagataaaagaaaacgacagatccaaatgagatcaaatgacattatgaagtacacagcagtgattaactcactgctcaccgtcggtgcacagaaaagtaatccacggtattgcgagatcagttgacgatgcgctaaagattgtaaacgaaggattaatcggttatggctatccagataccgataaaaaggagtggtattaatggagatggctgcaattatacttaaaattcttttgatcatcttatttatgggcttactggtgatgacttttcttatgtttggtgcagttgcctgtgacttatttaaaattattagaaatcgaaaatatggacgtaaacggaaggaagaaaaatgatatcaatttggttcttttacacaattttgccattagtgatgatgcttattgttttagccacagcatcaaataaaatttgggcatttatttcaattttgccgatctggattatagcagcggttattacttacttcttgctaccgtcgagaaatctgctgagtattctctggggtaatacgttttatgggatattttatttaacgttagcttctcaggcttatgacgatgatgacgatgctagttcaaagtttttaatggtgggcatccccgtcttagtgattttgttcttagtttgtataggcggatcattgcactcacacatgtctgttaagccaacatgggattctatatctaaagaatattcaaaaagcacagaagcgccaacattcaagcgcaatgaaactccaattgcattagcacctaaaacagttattaaccgtgttagaaaagcatcgtctgatattccaaacacgcaatattattcgatttctgatgaaattcaatcacagtactacaaaggcaagccagtttatgtgattccaattgaatataacggattttttcaaagcaatagagctggtgagattcctggctatttcatcattgatgctactagacaaaatgcaacaccaagatttgttaagaaaccttattactacgcagtaagtggctacttcaacaaagatgcgtcacgtcaaatctaccgccacaatcctagttggcttagtttagatacgccacaacttgaaattgatgacaatggtgatccttattgggttcaaacagtttacaagtcagaaccaatgagccatagggttaacttcggcagattacatgtggctgtcctaaatgcaagaaccggtgtaactaagacttattcagtgcacaacatgcctaagttcattgacgaaggcatcacgactggcattgctgataagatcaacaacgattttggtaaatataagtatggtttctggaactggagcaagaccggcatcatgaagccgaccggaaatggcgttgaaaatggtgtaacttcagtcttcaacaaagatggttcgattagttacttcactgactttactactgatagaaccggtgctgattcagcattaggttacagcatgatcaatgcaagaactggcaagctcactttctacagaactaacaacattatggacagcgatggcgctaaaaataatgctgatcaagactacaaagctcaaaaatggcgtgctaatatgccaattctctataacgtaaataatcgtccaacttgggtaatgactatcctagattcaactcatgctattcgtggctattactacttagatgcaagcgatcaaagcatttatggaactggtagcaatccaacaagtgctctggattcatttagacaggctcttgttgattctggctcttcggcaggtaacacaccaggtgaaaagaagaaaaacttctctggcgtgattaatcgagctgcagttgtttccaacaagaacaaggcaatgttcatgctgaagggcaaaaatatcattttcactgtgaatactaatgattatgattttgccaacttaattagacctggtgacaaggttaagttctcagcaaatgttgttaagggcaagtcaattggtaacgtcaatgaatttgaagataaaagtttagattaaggagattatcagttgttagtacttggtgtaggagaaacaatcacggatggcgttcacatctatcgtttagaagacgatttgaaccttcatttctggaagttaggcaataaagctgatcattacgtaagtacagcaggcttgaaattgcgcttagagattcatagtgaggataaaaatgaaaccaattgatcaattaaagtcagtcttagctgagagtggttatgatgtcatcaacgaagacggctataaaatgctagagaatgcaaaagttattaccaccgttgaacaagccaaggtcattgcacaattggttaaggacattgccgaagccaattacaatgccggttattataaaggtagtactgatcaagcgtttgaagatgggaagaaattaggagaaatactcaataagcaaaataaataatgatgtgatgtagattttaaagtttgaagagatacaggagtgggacagtgtttttatttgatttaccagacgaagttttaacagcagaaaatgtagatgattttctcagcagccagattaacagaatggaacggctcagtggggttagtttatctagtccccagctatcacttgctcccgctcactcaaatggcgttaatagccaagaaaagatgatggaaagaaggctggcagcatttgatgttttgaaagcaatcaaatatgccattgatcatacatcaggtgtatctcctcagatactatttgaattttacgtcttacataagaaagtatgggaaatcaatcgtgactgtaatatgaatcataatcagttcggtgatttcaagaatgttgcattgaatcaatttgctgagtgttggatctcggcacaagacaagtattttcctgatgaagctgatcgttttgatttgcagatttatcctggtgaaactctagcagacgctggttggagagcagatcaaactacgcgaaaacgaaaaaatgggatgtaaccgggatgaaagtgggatcataccgggatttgaaaaggatttgcttgggatttaatcgggattaagttgggatcgcccgatgatgaaaaaagcagataattgttattgtcgagaaagtagataggagatctacctcgaccgatgcgacggaaattcatttttaccaattagatctattctccttgtaaattagagtgacagcattgcatactatgtggcttgcaagttacctggttcgaatccagatgctgtcatagcctcagaaatactgaggctgaatcaatcttgttgttttttattgaatttgaacccgaagattcaacaaatgcttgaagacaagataaatcatgtttcccgacgtgtcgcagtagaatacctgcctcacgtcttagctctgcgatgaccgcaagcgagcggagcattgatataaaaaaggactattgagtccgtgttctgataacaaggttttcctaacctaaccgcctgaaaaggcggccccttgatctaagttcggcaacgtacatgttttctaaattgtggaggtgaaaatctccccttgatcatgttgctctgcatgcactgaaggtcggcacttcattagatcttagccagcagtgatgttggtgaactgataatcaataaatcattataaaaaatctctcaaattgtattaggtagtagtcaaactgctaccattctgggcagactcgttgtctgtccgtcgatgagtcgattattgcgagtttttccaatatagatttcctctgtcgaattaaattgaccaatggcggacagtttaggttcaattcctttactgctcatttcgtggttctgttagttaaaatcaagaacacattatgtatgaacacattcaggatcacgtattaaggtgctggttaaccccagtgctttttttcgtgtgaaaggaatcagcaatgtatcgcactaaaaaatatggtcttgtctcatgtaaggaagaaaacaaaatccttgctgaacttgaaagagatgtcgagcacaaaaagaaacacaaacataaaaaaagagggaaacaacatcatggaaaacaaagaattaattagcaagttgatcaaagaacgtgaaggatatacagaaagatcaatcaagattcaagagtttctaagatcatctgaatgtgcaaagattggtcacactcaaaagcaattattgattgatcaatctaatcaactaaacggcttagcattcattattaatatgagaattgacgacttgaaagacagcaacggcactgattaagttcagtgtcttttttattggcctgatttaggaggtgaaaccagttttgaagaaaaaagcaaagaaaaagaagtcaaaaactattccaagattgacaccaaaacaaaaagactttgctgataagttcattgaaattggtaacgccacagaagcctataaatcagcgtatgtaactgatcgaatgaaacctgaaacgatcaatacagaggcaaaacgtaccctccgattaccccccgtcaacgattatatcaacaagcgcatgaaacagatcgatgaagccaaaattccaaagcagaaagaggttttagagtttttaggtggagttatgcgtgggacattaaaaatcactgtagagactgatgatggcgttgaagagataccaccaaattggaagaatcggattgatgctgcaaaggagttactaaagagaatgccaattacagatgatccaatcacacaggctcaacttcgtaaactcaatgcagaggctaccttggctgaatcacgtactaatgaatcacaagacaagtccggtcgtatgcgtaagttaatatccaagaagtccgataagcaacttgaagaaatgattcaatctattgaaggcggtgatagcaagtgacagatacagcactactcgatgagtttaaaaagctaactgtcaatgaactaaaagatgaactggcttggcggtcatatcagaagtactttgaactcgtttacccagatatgacaatgtatccacatacgaagtacatctgttcactgcttcaaaaaatcgcagatggtgagcaacatttttatataatttcatgtccgcctcaacacggaaaatcgcttaccatcaccaaaacatttccaagctattaccttatgaagcatcccgaaaagcacgttatggttactgcttactcacaagacttatacagtcagtttgcagaatcaaatagacggcttttttctttatggtctcaaagagtaccagatgctgatcatgctttgcaagttggaaaaaacacggctcagcaatttaacattgttgatcatcgtggtggtttctatgcaacttcaatccttggtggtgccactggtatgagtgctgacttgttgattattgatgacccaatcaagaacgcagaagaagccggatcacctacgattaaagacaagatttggaatgaatggttattaacattcaagccaagacttcaaaaaggtggctcagtcatcgtaattatgaccagatggcaacaggacgacttggcaggacgcttacttgataattcaagcttcccatgggaagaaatcaaacttcctgctattgctaccggtcttggacctgatgaaacagacgtattaggcagacacaatggcgaggcactatgtcctgacttgcatagccttgatgaactacttggcaacaagcacgacatggggactcaaaagttcactgctttgtaccaacaaagtccaacagttgaaggcggtaatatcttcaaacgtgaatgggtgaagttttatgttcctgataaagaaacacaagtaagacttcacttaactgataaagacgcaaagatattgcctaaacacttggatacatcagtacaggcatgggacgcaactttcaagagcaaagccaacgatgactttgtcgctggtcaagtgtggagcaaaagtgacgctgacttatatctacgacctggctggtgtcacaagcgtttgtcattcactgagacgctagatgctattagagctatgacaaggttttacccagacgcaacaacaaagttggtcgaagatcgagccaatggtccagctatcattgatgccttgcaacacgagataccaggaatcgttgctgtttcacctggtgcagatagcaaggaagcaagagcagcatcagttagtccagtatgggaatcaggaaacatctatgtgccacatccaaagtggcgacctgaaatcgaggactggcttgaagaaatctttgcatttcctaacgcaatgcacgacgacaacgttgactcgatggtttacgcagttaagagacttcacgacaaccatagtcgtggaccagttatcagatattagaaaggaggaaacatgggactatttagcagaagaaaatcagaaccgaaaaagagaaccattgttggtgacggcatcgaccttgatccgtttaccagttatgacaatctaggctggcgagtggttaatgatgaacaagactacgatgcactgcacaatgagacaaaacacaatgctattgcaagacgtatcgttcataaaccagccgaagatgctacccgaaatggttttcgggtgattgtagaagacgatccagaacgtcagaagatgtatcaacggcttcattatgatttgaagactacacaagccttatctcagcaactcgtttatcaacgtgaaggcggtgatggttatatcactattggtgttaatgaaaatgacgatgccgattcaagtaagccacttgatccaaccacagttgaaaaagttcacttcattcatgcatttggtcaaaaccacgttgacaaggttttgtctaacgatgatccactcagtcttaactatggtaaggagcaggcaatcgtactcagaacacaaaacgccggttacaaggtcgatcctaacggtactcaaacgccaaatactccgagaaacactccaagagttattgatcaaagccggtattggcacattgcacttgataagtcgattgatgatgaaacaggtacgtcaattctgaccagatgtcaggatcaactcaaagcaatggatatcgcacttgaatcgactgggaagatgttacgtgaatttactttcaagttttacaagtctgatcagttgatggaagaaggagacgctgactttaaacgtgataagcgtgagattagccaagtacttaatacagaagcaatggcgtttggtcatagtcaagacagtattgaaaaggtagcaacaccaaccggcggtattgatttgctttacaacttcgtatggcaacagcttagtgctgcatgtggtattccaaaatctgttctaactggtgaacaagctgggacattagctggtgcatcacaagatgtcatcaactactacgacagcatcaaggcaattcagaccaacttgttaaagcctgaaattgaacagatcactcgtattttgatgtacgcaaacggtgatgaccctgatcaacttgattggaagatcgtattcaatgacttacaaaccatggacgataagacaaactcagaaatcttcatgaaccaagctaatgcttacagtagtttgatttctaacggcgttcttgcaccggacgaagtccacgacatgctagcaggtcaagacaccaaccctaacccagcaatgcagacagcaggtgacagtgttgatgctgaaactgtaaagaacattgtggataactatcaaaaagacaagaaacgagctgagaaacatgacgactcatagaagaatgcctcacactcgctatcctcgcaatcttgaagatgcttatcgaagacgcatcgttagattggtttatcagtggcgcaaagtcgctatggagtatttcaacgtctatatgggggactacttcaaaggcggtactcaaattgttggtgatgcacctaaaaagaacaatccgactgaaacagaacaacagaatgtactacataacctcgatgctatgggctacacgatcaaacaagccactagtgatgcaactattcgcaaaattgctgaacagtttgttagaacgattgatatgtttagctacaacaacgttgcaatgcagattcggatagctggtatcaacccaatacgtgatagccctgaattgaccaagatatttaacgcacgagttgctgagaacgtccaactgatcaagtacatgaaggatcgatatgcagacagcatcactggtgtcatctcacgagctatctcaaatggtgacggcaccggtgtaattacaaaagaaatcgttaaacaaactggtatgtcagtcagacatgctgcacttgttgctaatgatcaaaccggatcagcgcttgctaagttcaatgagagtcgacacaaagcggcgggcgcaaaagattacgtctggcaatcaatggaagataaccgagtacggcccaaacatcaagaactagatggcactcgtcaaacctacgacgatccaactggcggtgatgatggacagatgcctggcgaaccaatcaactgccgctgtgtggctgatccgatatttagcttttattaggaggtaagacatgacagataacaaaccacttttcggtattaactcagagaaagtaacagttgacgcaccaaaaaccacaaaagatgcgccagaagtagcagttaatcacgaaaaaactgcgttaaacgctcaatcaactccaaaaaaggaggtgaaacgagtggcaaagaatggatttgattacacaaattgcaaaaactacacagttaaggaaggtcaaaccttacttgatgttgcaaatgaagtcttagttgcctaccaacaactacgttacttcaacggcttatccaagaccaacccagttgttaaggctggtcaagtgatctacattcctgatcaagctatcaacgtaccacttggtaagtaatgattacgaggtacgactcatcaacagtcagcgctataacaaaggatccaattacaggttacattcacgccagaaacgtgcctatcgcacgagctggcgtttttaaatacctgaaaccggatggcactgttcgtcatgaagccaaactgccagaggatatcttgtctgacagcacggtggcgagtgcaaacaacaagccaatcactgacaatcatccagaaaatgaagctggtcagcgaatcctagttgataagagcaacacgaatactttgatgaaaggtcttactgcgtcgaatgcccatgtagatgaggcagacggcacagttcgagttgatttgacgattaccaaccctgatttgattaacaaggtcgataacggcaagcgtcaactcagtattggctttcaaacgcaggtcgtgcctcaaagcggtgtctacaagaatactgaatatgactcagtacaaaaagacatcactatcaaccacgttgctgttgttgatgtggcaagggaaggtccagacatttcacttgatagatcagttgtcggcgatagtgccgaaatgatcggtgagctggacgattttagtaaagagaaagggcaaaaaccacaaatggattttgaaaaggtacgcattggcgatcaaacaatcaaggtcgctaccgatgatgctgataagttgatcaagtttgactctgacaattcagcaaatcaaaagagaattgatgaacttaacgcacaaatcaagaaattaactgatgaacgtgattctttgaaaagcggcaataagcaagctgaaaacgacaggtcagaagcacaagccaaagccgatagtcttgaaaaagaattgcaaggttatcgtgacaaggttgaaggcgacggtttagacaagttggttgatcaacgtatgggcttgatcgatgatgtgaagtctatcgttggcgacagctttgatcctcacggcaagtcagaaaaggaaatgaagattgaagctatcaagagcgttgatggtgattccgctgaaattgatggcaaggatgacgtttacgttaatgcttacttcaatgcagtaaagaaccgcaaacaatcacacttcgttggtgctactgttcacgacttcaagggtgacagtgctgagagtaatgtttcagttaaccaaatgcatgaaaacttctacaaccttgcaaacaagaataagggaggtaacaagtaatggcaattcctgatggaaccatgtaccacgacggtcatctatccgccggtacagttgaaagacaatacgaagtcttaacagaagtcgctagtgccgatattccattcggcgctggcgtttctttagttaacggtcaagcagttacagctactaaggcacctatctacggcgttgcagtaaagcgtggctacttagacgttgaccacttctatgaagacgacattgaaaaagataaatggcatccaggagaagttctcggtgttcttactgatggaactatcaatgttccggttaatgaagatgtcgaccgtggagaacttgccactgttgatgctgacggttcatttaaaccgaccactgcggacgatgcagttggtcggtttttaagttcggctgataaaggctcaactgcacgtcttttagtccgcactcgttttggtggcactaccggtggcgctgacccaaccaaggacgatgcacacgcaattcaaccacctgaaacgccaaccccagcatctgaaaccaagaaaaattaggaggtaatgagttaatggctcaaatgggagttgcaactaaggaacaattaacctatatcgatcaaactatttacgatccaaagactgctccactagttgctttgcaattatttagcactatcaaagtatacccaatccaaatgtcttacagatacaaggttcgttcaactaaggcaatggcacaagcctacgcaaaccgtggcactgacattccagtagttgacgaaggtttcaaggaatatgaagttccaattactcaatcagcattagcttgtgagtactcatggatggaacttcaagaagcacaagcagctaacgtcaacttgcttgctgatcaagctgctcttgttgctcgtggtcttgctgaacgtcgtgaccgtatcattttcaacggtatggatattggtcctaacactaaaattattggcttgactgacactaatacagatgtgaccggcttccaacaattagctcttgatggtgaccacgcacttgataagttggcacaagacacagaagacggtgccttgaagatgcgtaatgtcttacgtgaagcagtccaaaagattactcacttgattggttacgcaaacgcaaagccaactttattgatgccacaagccgaaattgacttgcttgataacccagtatcaaagcttcgtcctgacatcactgttagagacatggtttctcaatactttagttcaattcaagctgttcctgaacttgaaggtcaatactggcatgcaaagaacgcttcaaaggctgacaagcaaaaagatatggctattgtctgcttaactgacgaggacattgcacaaattccagttgcaatggaaatgactcaattacaacaggaataccacgacggtgttactaagattccttatgttgaacgtcatggtggtttggcagttcgctacccatcggcattcgttcaaattactggtatcaatacaccaactgctaattagctaaaggaggggaactatgaacactgatgatccagtggtaccgatcactgcattgaagaacgcagcacctaaattaactcggagcatgtcagacgacactctcaaagagctaattcacgatgcgaccgttaacacattggcggatggtttccctcagccagttgacggtaaatggaatgacattacgcttacagcgatcaaatatctggctctgcacttggctagcatggatacttctgctggtcagggtattttggatgaaaaagttgccgtcttggaacgtaaatacgagtccaaaattggcaaagattggctccattcaagcgtttggggcctttactactaccgcttatggaagttattctgcggtggcagtaatcgatatggagtagtgcaacattgagtatcaaaatcactgatgataaaagcgattgggacgcaatcaagcacgaaatcgacatattaaatcgctacatggtcgtaattggtttttggggtaacgatcgattgatcgaaattgtatctgcattggaatatggcgctgatatcaagccacacaagccggatggctggttaatcataccaagtaaaaatgatgaacttggtgaggatggcttacctatgagcagtagtgaatgggacgaaaaacatcctgatcagcaactgttccgaccaggtggcaagaaaggtgctcatgtcctagcggtcaaagatgcaagcagtgatacaggcttcaagatcatcttttatttgatgaaagaagtcaaaattccttcaagaccgtttcttcgtaagacttcgattgaatatgaacaaaagtacattcgattgacacaggtcggagtccagcgagtgtttgaaggtcgtgctacaggaaaaggcttacttgacaagctaggtgctgtcgctgttgctgacattcagcatgagatgcgcaggctgtataagccaggcaacgcaccaatgactatcgataacaaaggtttcaataatccattgatcggtaaacatgctggcggtcaaggtggggcactcattaacaaaatcacttataagatcatttcgaaataggaggacactatgagtttttacatggatgtagcttcgatgttggacgattacggcgttgatatcgaagttcggaaatcagacaaaccacacacaggcaaaaaagagcttgtgggtggttttttaatgtctgacgatcaatctaccttaatcgatgaaaaaacagcagagaaacgacatgagccggttattccggttaatcagttgacatcacaactcattcaatatttaaccggcggtactcaaaccaatgcagacctaatgtggctgtcatctgggaagtactacgttcacacaatggtcaatgtcccatcacagggtggtttatttgaagtcactaactcttctaactatcaggactattcaaacctgatcatttacgaattgaagggagatgacgcacaccaacatggaaattcaactcaaagataatcttctgctgacttatatcattcagcaactggttaaagagcgtcttgattgcgatctgctctatcagaatttagtttctgaccgtccacaatatccttttgtcacttattcgtttattgtgccggaacaggaaacaacaggcgattggttgggcatgggacgacagtacatctcacacctacaaattgattgccatgctgacaacgccattcaagcgatgaatatggcaaacgacctttacagtgcatttcaaagcagtgtttatcgtaactactttgagcaagcggatattgacccacagaattttacgaacacaagcgacagaacagtcagagttggtacctattacgactataggttcggctttgattgttcttttttagtgtccaatggcggtcatgtttactcaccggatgacctccacttccaagctcagccggaaacagaaatcaatacagtacaactcagcgacgctggtgacagtgaagttatcagcgccaatggaaaagaaaaggagcaatagcaaatggcagaaaccattacagacgttcgtccttttacgagagttaaggacgttgacgtagaaatgactgttgtcaagccacctgcaattatcgggcttggcaatcttcttattttgcatgaagttgacgcaggctcatcttctacagcaccaaagcctgctcttgctgatactggcaccggcaaggatacgccagctaagagcgatacaggcaagactactggcacaactgatggcaaggctactgatgatggcagcaagaccatcaatgtaccaaagatcacaccagttgcgccagtaactggtgtacctgacaaattggaacccaacgacgtattgaacggcgtattaagccgcaagactgatccttataccggtgctcaatacgttgaatacgcaacagcagacgcagttggcgcttactacgacaagactgatccaatttacatcaagtcagacaactacttcatgcaagaagcagcatctgaccgtattgccgtattgaattatccaaagggcaagcttgctgacgctttgaaggcattctggtattacaactgggccttcatgatctttgataagtcacaattcacagacaccaccccaagtgatgacgcaattattgcatctaacatctgcgaagctaacaaggatcacttcttagtattgcaagctactcaaccagccgcatacgtaaccttctatgcacaaaactacaccatcggcttgattcacgacttatcagaaccaatggatgcagctctcatcggtgcaaccgccaccttgacagttggcttagttacctggaagttcagaaagcttaagggcattactgctgaccaaatcactgttcaagaaaagtcagctatcgaccgtgttcacgctattgcttacatcgaagtaagcggacaaggcgaaacatcagaaggctgggtattgtctggtgattacatcgactcactccacggcgatctttgggtaaaaaccaatatgggcgacaagatccaaaagtacttgcaaaacaccgacaaggttccatatgaccaacgaggcattaatgcactcgccgccatttgtagccaagtcctccaacaagcctacgaacaaggaattgttttggaacaagaagtatacgactcaaacaccggtgaaactcaatcaactggcaagggggattactcagtaaccgccactccacgttcagctcaaagtcaaaaagacttatcagctcgtcactacggtggtttgagtttcagataccaccgttcaggtgctatccacaccgttctcgtacacggcactgttcaatctgatactttcactaattcaaaagcttaaaggaggagtaacacatggcaagttttaactcagccgaaaccggcttgatggcaaaatacaacgccaatgacaccactttaatggttgacggtgaattgatgtatggttttgcgacagataccatgatttccgttgcctacgacaacgacaatgttactgtcgcacaagacccacaaggcaccgctgttgcctcaatcaacaacaaaaccggtgccacattgactgtcaacttgaacgaaacttcaccaagcaacgccaagttgactgaattggctaacacacgtgcagaatttccactcgatttgagaacttcaacagttcaccaaaccgccacacactgctacatctcaaagatgccagacaacaccgcagcacaaaacgccggtaatcgtgcatggcaaattcacgcacttaaccttgatactgaatccttagtcggtcgttagtatcgagaatggctttcacgcttacaaaacagaaattaaaaattaaaggagaaaaactatgagcgaagaaattcaaaaccaaaacgtaaataacaaccaatcaaacgaagataaggctagccaaatggctactgaaagtaagaacttgcaagacatgatggctttgattgataagcaagaaaagtctagtgaaattgcttcacttactggtaagcctactttcttaactatcaataagggcaagaagaatgaatacactatcgaagtaatttttccaggtgtagcaaaagcttcaagcttacgtgatgacgcaagaactgctcttggtgccattgatcaaacctacttcatgaagaacgttgctattaaggaattgattgtacgtccaaagatttactctctcgattggtttgacaagcgtggaggctatgacgatgcttacaacaagattttagattggtttcaatcaagcattaatggggaaggctacaccgaagaagattagtgatttggcttctgatcctgcaacgtggttaccacagtgtttggtaatgcacggtgttcccgaatcatggatcaatcatgcaacgctcgaccaattaagagtgatgtgggaagtagtcaaaaaagacttgaaatatcagacatatttaaccgctaaagatcaagcacgaattatggcaaaaggcattgcgttggcatttggcggtgaggacagttaaagcctaataaggctttcttattttgcacaagaaaggatgagatagatggcaggacgacatgttggtattgatatcggcgttagagttgataattcagtattcgattcagttgatagacgtattgataaagttaaagctaatgcagaacaacttaatcgggtgttgtcacgtaccaagatgccagattctgccgctaatggcttagacaagcttaatcgtgcatcaggtgaaactaaaacacagattgacaggttagctaatagttataagcaagttggcactaataacaatctcaatcgtgcgcaaagtgatctgtctggtattgctgataaggctaagaaagctactgaatcaactgaccaattaaagcagtcaatgaaccgtgctcatgaatcatcaaaagcacttggtgatatgggtagcggttttgatcgtgctagaggatcatctgacagagctagagaaagctttgataagactaccggttcatcaaataagttaaagagtggctgggaccgcttgaaaggtgctggatcagcattggttcaagtcggttcatctattgctactgcgatggttccagttgccgctgcattcatgaaggccaatggcgaagcaaccaagttggctgatgaatacaacgttatcaagaacttgcaggaaaccggtggtgattctccgagagcagctagaagaaatactcgtgaaattcaggctgaaaaccggcgtttgtctcttcgttatggtgttgatcaaaacgaattggctagaggctctgagcaactgctcagacgtggttattccggtcaacaagacttagctgctcacaagtactttttgcaagccgctcgtgctactaacgaagattacaactcaatcgttaactcagctgcacctatgctggaacagtttggctataagtccagagctggtaatagtgtaagacgtatgtctaagtacacaagagatgttttgaacaaagccgcttacgttgctgacttaacttccggtgacgttggtggtgaaagtggttttggcgagtccttcaagatgatgggtagtgccgctcattcaaatggtcaaactatcgatactatgctgggtgcattgggtacgttatctaactacggcgaagaaggttcgagtgctggtactggtatgcgtcagatcatcactagattgatcaaagcgccacatagtactgcgatgctaggtgccttgcatgatttgggtattaatcctaatagcttgtacaccagaaatggtcacttgaaacagttaggaaccatctttgagatgctgaatcgtgcgtctcgtggtaagaaatctaatcgagtatcatccgacctgcaaactttatttggtcaaacaggtttcaatgatgctcagattttgatgaatcactacggtgacatgcaacacaatgtccgagaatctcaaaatgctgcacgtactggctatatttcaaggctgtcaagaaagaacatgtcctcattgcagaaccagttagctagaactaagcaacttgctactgatatgggtatgagctttgcaaaggaagtcgcacctggtatcagcaaggctcttggctatgctaacaagctacttgaagctatgcgaggtatgccaaagccagttaagactgctgctgcttatataacaggtattcttggcacattgggtgcgtccaagttagccagtggtttcttaaaagctaatttcggtatcggtaacggtaaaggaattggcgctggtataggtagactactgtttggcaaagagaccggtgtacgtccacgagacccggttacaggtcaatacatcaaaggatcatctcgccagggtggcttaatcaatgcactgaaaggtaattcattcggtggcatgttcaagctcggcagagtccagcctggtgagctaacaggtaaagcactagttggcagacgattgcttggcggtgctgttggtgtcggaactgcattagatgttggctatcaaggcttccaagcttacaaagatcgacacaatgcagctaagagatcagtagacattggtggcgctgtcggtacaggtgctggtgccatcattggtggcattttcggtggtcctattggtgctgcacttggcgcacaagctggtaaactctttggtcgaattggtggtagtgctgttaacagctttgtacatggctggcaacgcaaaaagccaccaaagaatttctggtcgcttgaaaaccttggctggtctactaaagacacattcagtaagattggtagatggggtggtcaagttggtaagtctatgggcagagcacttggcaaggctggttcattcgtcaaaaagaatggcaagcaattagccttaactgctattgctccgtgggctggtattcctgcacttttatacaagaacaaccctaaattcagaaaatgggctaatagcgttggcaagactatccaaaatggcttcaaaggagccgttaagtgggtaaaagacctaccaggcaacatccataaaggttggaatcgtgctgtcgaggctagccacaagttcttcaaagatttacctaaaaacttagataaaaccaagaagagtgttggcaaatgggctagtcaaacaggcaagaatatctcaagggcatggcaacgtggcaagaaagctactgttaactttgtcaaaggcattccaggtaacttagctaaaggtgccaagagtgtagcaaattgggatagtcgtaccggtcgcaatattcaaaagacttggaacaaaggtgtcactggcgtaaagaagtttgtcggtggcattcctggtcagttaaacagagcacacaagagtgtaagcaactggtctggcaaggttggcaacagtatccaaagcggttggaataaaggcaaaaaggcagttggttcttttgtttcttcaattccaggtcaattaggtaaagcctataaagcagtcaaagattgggctggcaaagtcggcaatacaataaaagatgcttggaacaatttctggggtaaagctggcgatatccgtaaaggtatcactaataacctgaaaggttttggtaatgacttaaaccgtgcggctggtggttctggtaaagccttcaagtatgagaagatcaaatctcatgcaactggtggcttaatcggatcagctcatagagccttagttggtgaagccggtcctgaattagcctacagagccggatcaaacgcacgtcttttaggtgctaatggtcctgccatcactaaggtgcgtccaggtgaacacattcttaatgcaagagacactcgcaaagtcatggctggtggtttaggtcgtggcttaactctcaaaggttatgccactggtaacactaagcttggtcaaaccaccaagacagtatccaaggattacaagaagatcactgatgacgctactaagtctttgaagagtttaagcaagaacaatgcttcaagctggtcaaagattaacagtcaaactgctaagtacaacagcaaaaacagagctaatgctactaaggaatacacaggcatgcgtaaatctgtggataagcagatgaataacatgcacgatggtgttatttctactgctaactcaactagcaaaggttttggcaaggctatgggcaagatgcgctcatacgctaaggacgcaatgggtgacaccattgatcaacttaaccgtggtattaaaggcatcgacaaggtattgagtcaatttggcggtaacggtagcgtcatcaagacggttcactttgcacaagggtctgacgctaacggtcgcttgacgcaaaatactctttcagttgtcaatgatgcgactagcggtccacgtcaagaggctcttgtctcaccaagcaacgaattgtacttccctcatggtgacaacgttcatttgatgattcctcgtggctggggtgtcttgaacggcactcagacgcaagaagtcgctagaaaacgtggcattcagcactttgccaaaggtagtggcgtaagtcatagccaattaagaaagattgcatcacatgcgcttgctgatcctgctaagagctttgcagatatgttcaccaagaacatcaaggaaagcggaccagttctgcaaaaaggaacggtcgatcttggcaagaatgcgtcaactcactttggtaatccttggagtactgctatgtggattgtcatcaacaatgcgattggtgactccactggcaagggtggtactcgtgagcagtttttaaaatatgctgaatcaacattcagtggcgttaagtaccaaatgggtgcggcaagcaagacactatctgactgttcgggtatggtaatgcaagctttacgtcactttggcgtagatattggacgtaccaccgtggcaatgcaacacagttcaggtgttgagtacttgggtaagtcattatctaaaacaattccaggcgacttggttatctttggccatggaacaggtgccgctggtcacgtgggaattattaagaacccacacaccggaacaatgttcaacgaaacgccaccccatgcacgcgttacctcaattgctgatgacaaaggcatgggatacggatattaccgtgttcgtggcttgcataatgccgctcaatctaagaagacagcagcggctgataagaacttaatggctcttgcaaagaaagagctaggcagtaccgccttgagttggattaaaaagaatcttagcgatgatcttggctcacttggttcatttagtatcggcggcgacttagccgaaagggctaaagccctagctggcggattaaagaagcttgatcctaaagcaaccaagaacggtattgcggctgttctgggtaattggaattttgagtcaggtggtttaaaccctggtgcagttaacagcagcggtggtgcttccggtttaggtcaatggcttggcggtcgtaagtctaacttaatcgcttatgctagacgtcacggtacaagctggaaaaacgccggcacacaattaagctttgccgttaaaggcgaaggctcagacagtgctattcttcgctccgttttggaaggaactggtagcgttgccagcctagcaaacaagttttcgtctgaatgggaacgtggcggctacaatgctcagcacgtcaaaggtgccatggagatccgcaaagttcttggatatgctaaaggcggcgatcctgtcgttggcaataaggttctagttggcgaacatgggccagaattagctgaattcaaagatccggttcacatctactcaaatgaaaagacgcggcaaagattaaagccactaacttcatctaagccgaaagtacgcccagtaagaggaactggcggggctttaggtgacattcaagtaaccgtgaatattaacggtgacgttgatggtgacaatgctaaattgcaaaaattagcaaaaatgattggcgctgaggtagatcaacaagtacgtcaaaaattaaatatcattcttgatcatattggcgatgatacgggtgacgatgatgatttcttatagaaatgaaggtgatgttagtggttcaagcaactaagccaaaaaagagaacagctgaacaaaaagcccatgactctatgaaatactgggacaagcggcaaaaacatgaaagcgccgtttaccgaaaaatgttttcaaaggcgcagggctatgacttcgattcacattttgaaaagaatcaaattaaaaagaaaaagcttatccgaaaacgtgataattgtttgaagcttgttgatgctgcaaacaaaaggaaaaagcaagcggaaaacaattataaaaaagcgaaagacaagtacgaccgtattgttacgcaaagaatcgatttaagtaacaaattggcggaaattgcggaacacaacaccggctggaagaatgaaggtaaatgtgctatttaccgttcggatggcaaaggtgaaattatttatatttcgccggcagacggtgaaagtgaaaatgtttcttcaaacattacttcttatccggttgatgagggcgcaccatatagctcatatgctcgtgtaaatagtaaaggcgcaacagttgcaggcatcattgttggcaaagataaagccgattcataccgtaaatggcacatgcttagtcaatggaatagttcgcatgttcggttaacctatcgaggggacttctgctataagcattacttaatcgcaaatatgaacaacgactataagaatcttcgagataacattgaagtttcacttacttttcaatttgtctatcaagcaaaaatcaccacttcaaatgatagtaagcaccacagaaagtcgtctaaggcttctaaatctgtcgcaggtaatcgaaataaaaagtacactgctatcactattaaatctggcgataccttgtgggctttgtctaagaaatacggcagttctgttcaatggatggcacgagtcaaccacattaagaatcctaacttaatctaccctggcaataaaatacgggttgcgtaggcggtgatttagatgagaaattatcttgatgttgatgttaaaaatattccttatatctttcaaataacccttgtgggcgatacctatgatatgagagtagattacaacgaagttgcggattactacacaattacaatttggcataacaataagaggcttctaacgcaggagcctcttttgcttggtcaattagttggtattgatatccctgatcccgaattgccaagaattgacattcgcacgatggacgaaacgggtaaggcaacagaccaaggcaagggaacatttggatatgaggtccgcttgtatcttgacgttgttgacccgaatggatcagaaacagaagacccatcaattaaaccgctaggttatgaccctaacgaaaatgatgacgacctaacggatgaggaagtgtcttactaatgatcgttactaaagatccacatatggaatttgtggcggttgatagtaaaggacacaagcaaatcgtatataacgatgaaacttacgaacataattatccttttacgtttgaagtcccgtttactaatgatcctgtcccgtctacttttacaacaactattttcaatttaaccaagcaacataaagacttttataaaaaagggatgcactgctggataaattttaactggggtaaagaccctaaaaaaatagctgaaggatttatctctaatacgggtaaattaagcaatgatgggacaactgatagtaaagttttaacttttactgaaggcacaaactacagcaatgtagctgctcgaaagctaaagctaaaaaagaataaaaaggttaatcactacaaaaccgttaaaatcactgaaaaaggtcattacaagaatcagcgttatagtacctcggtcgttgaaacttacaagagaggtcctaaaaaagggcagaaacatatagtccaccattgggcttatcgaaaagtatgggttaaaccaaaaactacaaataaaagggttaaaagccgtgataataagacttattttgctaaccgagtttaccgaaaaggaacgacttataagcaagtaattgaaggaatagcggaacaagccggtatcaaaatagctaaaatcgatttagctaaaaatgaaggaattaaaaaatcctttaccgctaaaggcaagccgctaactttaattaaaaactttgttaagttagcaaaatcggaaatgttttatgaacgtggcaagctcgtaattgtcaatcctaatagcaagaaaaatacttggtttgtgattgatgataaagacttaattcaagttccatcgcaaaacgatgatgataaaaacgggacaacttggcaaattgttacgcccttagtcccagaagttaccgttaataccggcattatcatgaattctaagttcttaaaaggaaaatttgtcgttaaaaatggacagcatagttttgatggcgaaagtccacaaactcaatgcactattgcggcggttacaaaagctaaggctggtcataaaacaaaatctaaaagtaaaggcaagaaaaaaagtaaatctaaaaaataaggagatgacagtatgaaacaaaaaaatagggttccaattcgatggtatgaaaacattagtaaggtgaaaaaccgattcagcagaagtcttgaatctgcttttttagctaaagttttaacttacgacaagaaaaaacacattgcagatattcaaccgctggcgaattggatcgatggcactaaatcggctcagtacttagatgttccggttgccgaatcttgctataggcttgatgaattgttagataagtttaagtcggatttaaaagccgttgatagtagcccagaagttaactcacattttttagaacattatccgaaaaagaagtctatgagagttggcgctgtagtgatagccgttactatggaccgtgacattgataactgggacggcactgggaacacctttacgccaaataccggcaggatgcatgatgcaaacgactcaattatcgtttctgtttataagggtgacgacgatggctagggacctatttatgagtgataatcatgacctagttattgatccgattactcacgatttagaaatgactagcggtcttgacgaaatagcgcaaagaattaaggcaacgctagaaattcgatatggcgaaatgcaacggctagaccctgaaatgggcgcggattatagcagctttttaggtaaaaacttcaataagcaagcggcggagaatgatatgcgagcggctattgaagcaaacgtaccggaagttgaaaccgttgataatatcgaatttatcaagaaacctgaaagaaaaatgcagattaattttagagccaccgcaaatattggtgaagtagaagggggggttacaagttgacaactgattttggtttaaaagaaaccggttatattgccccaagttttgcggaaatcttagacggtgttgaagacgattaccgaactagattaggggatgatattgcactaacaagtaatgcttatctaggaatttttgcccgtttaatgagtgatgcgtcttatgatttaattcagcaacaggaacaaatttactattctggattctattcaaccgctgtaaattcagcattagaccgattagcgggcaatatcagtttgacccgtaaagttgacgctccatctcatgcggaagtagtaataacgactgaaggcgaatatttaattcaagctggcgaaaagttcgaaacagaagacggcttggtatttgatttaacagaagacgttatcacttcaaaacaaagcaacggggcttttcaaggaactggaaatgttgaatgtgaagaaactggtgaatttactaatgtatcagccaacacaattactttgtttgccaacccagatgaagactttatttccgtaaccaatccacgatctgcaggcggtgggcaagattatgaagacgatgaaacctttagaaaacgtttaattatggaaaatgccgcccgtcctggtcctacagaaccaggtattaaatcggcgttaatgaatttaaacggtgttaagcaagttggcttcgttgacaacgacaagtataagacggatgaatacggtaatcccgaatgttcagttcacatttatgttttaggcggtaacgatgatgaaattgctaaaaccttaattgataaatgcgcggctggtatcactttagcgggttcaattgttaaagaagctccggacgctacgggaaaattaaaagaagtcaaatttgaccacgctcaacaacataacatttatgtaaaggtcgatgtatcaattaatgacgactggaacagtgatgcgggggttgacgacattaagcaagcaatttgcgatgaaatcaactcacttgaaatgggtcaaagagttaattttacccgcctttattccgttacttatgatgtcaacggcgttgatgatgcaacaattgcaatcggtagcacaaaagataagttagcggaccaaaatatttctattggtcgttcagaatttgctcattgtgaccctggagatgtggaggttgatttaattggcttatgagacaacagaccaactgatcgcggaagtagccgaccactggaataagaaaaaagataccgttttttatcaattgttagacagttacaattcactgcttgaaaaaatcagtgatgaaaatgaaaaaattgcggagtggcgtagcattgacaaagcaaaaggcacaacccttgatttaatcgggcaagattacaaagcttatagaattagtgatgatgatgaaactttccgttttatcatttttttacacattttaatctctagggcacagggaacaattccctcaatggttaaaattctgggcactgccttaaatgcaaagcctgaacaattcaaggtctataaaaccggtcttcgacatgttggtatcgaaataccgtgggacaatgtgcaaacacttcaaatgcaaaaattcatcataaagaatattcaaaacctgctcgcgatgggctactggattgatgagatcgtgtttgtaactaccacaaagttgccgctttacgttggcatgggtacgcagatcaaacatcgcaaaatcgagcgatcgcccgttaagtggtggactggctggaaggctaggacaagcgacaagcaatatattgggatagctacacagttcaagcatcacaatactttgtcatcaaataccaaatggtggaccggctggaaagctgaaagcactagaagccaattcattggtgttgttggtcaactggctaaatcatcggtatgggcgacaacagcagtgtggagcaagccacaaacagcagaaattcacgctggcttaactattgggaacaaaacattaactacaactactcaatcgattgcgactgagtagttttttaatacaaagaaaggagcaagaaatggcagaagatcctaatacgggctttaaagagaaattgaagcaaacgatcttgaccgatgccgggcgacatatcttcttatcggttggtaacggcgtaggcacattggtttatacacgcgctatcctatcaagtcaaaaacccgttaatagttccggacaagccttagatgatgaagcaattcgtcaaatcactagtttgccggacgatctcaaagaagggcaattaaccttaacgccagttacagatgatcactttgatgtaattgctgactttaacaacaagaatcaaccggcagacatcaattttagttgtattggttggtatgcaagagttgactcaaccaatgaacagaatcaaaaggtacaaggcgatgaagctttaatcgctatcacttttactactaacgatcacgagaccttagcggcaggtagcccagacggtttatctactgatgttatctctgcacaattgtctatgacaatcgcagaagccgctaatatcgatatgactgttaatgaagtgggatacgttactcgtgccgagcttaatgcatggcaaactaaagtaacggctgattttaacggcaagatcgaagacaacgaaaagaacacgactatcaccttacgaggtaaagaaccggtcaaggcggatggcaaccatacctttaacctaaacacctacacaaaagaagaaattgatcaaatggtcgctggtgctggtaaaggtgcagggattaatactgttcaaggcgtggcacccgacaacacgggtaacgtcaacctgggtacggtcttttatttaaagagtgaagttgatcaaaagtttcaagcccaacaaaatacaattaacgaccttaaccgcaaaaatggtgctaaggacacacaaattgagagcttgaacaaccagctgaccggtgccaataaccaaatcaatgacttggtgaaccgagttaagaaactagaagaaggacaagcatggctgaaccagaacgctgtaatcggcaagagattcccagctggtcaagaagcacaagcccaacaatgggaaaatgaccatccaaactatctagcaatgattgaaaagtagaaaggaggccgactgaatgagccaaatcagggatccagcctatatcacagaacaagggcgaacaatgatgaccgctggtggtgacgttacttacactaaggcggtgctatatggtcaagatatcagtcacttaaccgctgaccaagtgcaagccctgacctcaattggcagccccttaaaacaggtaccgattggtgttagcgacaaacaaagcaacggcaaagacacaacggtagtgcttgaagccacttttcagaatgacggcttaacagctgacttgccttacacggcagttggcttttttgctaagaaaggcgaggacgaaaagctaatcattgttgcggttgctaatgcaggggcttacctagcagctacccgaccggatggcgtagcgactgacgctcttgatcttaaagtagcaattgcgattggcgacgcaaccaatgtcacggcagtggttgacccgggggcatcggttacaccggcaactttaaacggtgcaatcaacgaaactaagcaggttctaacggctttaattgatactaaggctagtcaatctaaccttgatcaaactaacgctgaagtggctaaaaaagccgacagtgaagccgttaaaagtcagttagcaaccaaagccaacacgacagatatcgacaagcaggttaaaaccctgaatgatgcaattaataccaaggcagacaaagccacggtagatgccgagattgcaaaaatcgactttaccccgtacgctaagaacgctgatgttgataccaagatcaaggctgttagtgatgtggtagccactaaggttggtacggattacagttacagcaaggcacaactggacgaaaagcttttagccctatcgaccgacaccaatggcaaagtcagcgccgaccaagtgacagcgttgattgccgacaaggctaacaaggcagacgttgacaaatcctttaaggcagtcaatgacagtttagcaaccaaagcggaccaagcaacgacttatagcaagactgatgtcgataagttgcttagtgctaaggacgatacgactgacgttgatgcaaagattaagactgttaccgatttagccaacactaaggcaagtcaagacagtcttaataagttgagccaaaccgttgataccaaggctgacaaggctacggtagacgcccaaattgcgggaattgatttttcaaagatcaggttccgcaagcagtacttagacggccaaggacaaacgcaagatcatacctggaaagccaccaagaatactgatggcacttacactattgatctttacaaagatgactggactgctaataaagtgaacgttttgcttagtcagattggcaccaaggcagatcaatcaaacgtaaacgcccaagtacaagatgcaaaaaatgccgctacatcaagggcggacaatttgcagagtcaagttaacaacttaaaaggtgcaagaaccgcaaattcgccagactttgatagtttgaccgattcaggtccttactatgtgacaaaccctgaaaaagggaaaaattccccttgtgggggcatctggggtacgctgataatttctaatggcgctgatcatagaattgttcaaacttactaccctgataatgatgactctccattttatcgaatgaaggttgataataactggcaaccctggcgacagatggcaaaaatgatcgacatctctaatttacaaaatcagatcaacaccaaacacaacatagctacaccactgtttagagagattcaaaactcaaatagttggcaagatatttttggggttggtaatcctaatagcgtactaacgtctattagaattgacgcaggtggatcaggtccattattgaatgattttgctgctggtgttggctttggtggcgcagatacgaaaggcgttctaagcgttggttatcataataatcaagctcgaatcactggcggtaatggcaacggaccagtttggagtgaagacatcgcttggaagtcggatattaatagcttacttaatacgattaccacattacaaaaccaagttaacgacttgattaatcaaatcaactacatcaaacaaaactacctgcaaggcaagcggttcccagccaaccaagaggcacaagcccagcaatgggaaaacaacaatccaaacgatattgcgatgattgaaaaatagatagatagaaagaggtgaaagcatgttagatcatctaatttttaatgtaaaaaagtggtttgaaatttcaaacgatatgtccgctattacagctaataataaaaactattatgcttgtccatcaagatttactgtcatggcagaaacaccgatcaaaaacccgaatacgggtaatggctggcgagtattaaatgatgctgaggttacctgtgttggggcaggtcaagacgtttatttctttgatggacaacttgaaatttacgctgatagtgatgaaaacaagcatcctaataatgcagtttattcgcattactattacacgggcgtagttgaaaaaacaaatgttagaaatgtaatatgggggggtaaaagccttctacatactattgcgtcaatggttgagtatgctttcactctatttaagaaaggagcggaaacatgctagatcatatgctatttgatcgtaaaaaatggcgaagcctgacggacgaaaacggcaactttaatgctagttttctacctacatctggatatttgccatctgggtcagttttaattgatgataacggagctgttaaccctggcaaatctgttcaaagcattaattttcaaatcgttgggtatgacagaagaataaatgcatttatcacaaacaaatttgaaacgcaagacacttatagcttaggcgcgggaaatgagacttatggtttttattacagagtgctggtatcacaagctcgcaacttgaaatggtggggtaaaccccccctaatccgcttatgtcaggcatttagagctatcactagaaaggtggtggttctatgatcgaaaagatgatcttcaataaaaatgattatcttatgttccctaaaaaggtcaaaattcccaaaggaacttcaacaagcaccgtttttacggattttccaaatactacttactctttactgaacgcagatttggagctggatgtatgtgcctcttcaaataccgcttatttagtcgggagaagtatagatttgccaattatctgtaaaggagatagtagcaccgtctatggtcctgtatgggttcgaaaatcggactgtacggaaatcttagggggggtaattagcccgttaatccacctataccaagtacttagagccgccaccagaaaggcggtggctgtatgctagatcacatgaagtttaataaagaagactactaccctacaacaaaaattattgtcggttatgtaaatacagaattaattggcagagcgataacttgcagtaaatataaaataggatggtctagagagggagtcattaatgcttattatagctattctatcaatagtaattcgattcaatggaataaaccggatgaaataggcggcttagcttctacgggtgaaatcacaggcgttgtggtagatcaacataatattccatattatattgttgacgttgatcattggataaataatcctaatactggtgatgggatatacacaccgcttatcaaagcatcggatatcatgactaagtatttatcaagggaacagttatagtattagtactcattgagtgctttttttatgcaaaaaattagccttgctcacggggagttcccgtgggcttttttaatagaaaggagccaataaaatggctgatgaaaacacacaagttgcaccagtagcgggcgcagaagaaaacgctacacaagaaaacaaggggtttacctattactttagtgatcctgactctgtcaacgcagaaatgcatcacgtagtaattacgttgccttatgagttgccagaacttccatggcactggcacattgaaaagccagacgacagcttaaaagatcctgtctgggacttgaaggttaatggctgggtagaaaactccaaggacggtcaagccgcaatcttgcaagaagctacacaaaagattgaagaattggataagaagagcgcagaacttgataagaagaacgccgcacttgaccaagccaacgataagtttgaccaagcaatgaaggccatgcaacaaagccaacaagtccaaacacaacaatccttagcattgacccaaggcttgcaaaaggtcgcagaagggcaagaacaagccaacaaggttatggcttcaatgcaacaaattctggttggcatgcaagcagatcaagctaagactgctacaccaaccagtgacactaagccagcagaaaacactaacaagcaagaaaacggaggtaactaattatgactgatttaaacgctttatttttacaaatgtgggtacttgactatcaaatggggcttttccaaaagccttactttcaaggcttagttcaacaaggcttattggacgcagcaggttacaagaaagtcacaggtgaagactatgttgcaccgcaagctcaacctgcaccacaagcttagtcgctggaatttcatcaaaacagggctgttaatctcggcattggcggtctgctttctgatagatcgaacctactttttttacccaccaagtctagcacctgcgtggaataacgtctgggtcgatagtatcggcttgatggcaggactaattttgattttgtgcggtgtttttgatattcgggtacagttaatcatcaaagttggtctaggcgtgtcagtagcattcttgacagttctgctggttgcggaaagctttcacatcgttggagccggctatttcagattccaccctgctattgtttttgagatctacgcaatcattaaccttatgcagattgcttatgagtatgacccacaggactgagaaaggagctgatacacttgcaaggtcttaaagacgtacttagtgtactagctccattcctgttggggttgtttacttcatatctaagtgataagagaaatacgagacaagacagccatagctttttagtagacgactatgaggctgtagttaaagaaaataaggaattacgcagggaaaacgaaaaattgcgaaaggagttatccgaaaatgaaaccaaacactagaattttagactacaccactcttgtgcaagatggtgttttaaccttggacgatgtgccacaagacatcaaaggtgcagttaccaagtgggtgcgctatttgtcaggtatccaagacgaaaccatggtcaaggacccagacgcaaccaagccagcggtagaggataagccagtaggctacacccctgctaagacgggcgacatcactagcggcgtacttactactaagaaggtgacccaataatgaatctcactgaattaactgcttacacacaaatagttgttttggctatcgtggctatctgtatcggtatctctactagtatcgaatactttgccaaaaagtcggctaaaccacttccaaagcaagtaatgaccattgatgagattgctaagtttgtcgtaagcgaagccgcaacgctggatatttctggtgccgaaaagaaggtcaaggctgtacaagccttacttgatcaagccaagcaagaaaacaagccagtgaccgaaacagtcgccaagggtgctgtccaacatgcttatgaccaaatgacagcggaccaagccaaacaagaggatacacaagataccaacgcccaaccaattggctttgtatcaggtgacgacaatgatgacaagaactaagacgtataacgagtacgtttttgaatcgtttgacaaatcgtttgaaaaccaaacgaaaggcggtgaaaaagatgtcaagctcaatcgtatcaaagaaaagctatggtgtggacgtagccagcttccagaaagaaaacgttagctacacgggtgcgaaatttgctatcgtaaagcttacgcaaggtactggatacatcaacccgaaagcaaaagcgcaaattaaatctgcaaaggctcatggcttgctaaccatgggctatttctatgccaaccattccggctcggtcacacgagcacgggcagaagctaagtatgccgttgaaaaggctaaggcttacggagtcccagctggtagctacatcgctgacgactgggaagaaggttctggcaattcagtcaatggcggtgctagtgccaacaccgatgctgttcttgccgcaatgcaggtaatcaaagaagcaggatacaagccacttgtctattcaggtgctttcaatttacgaaatcatttgagcaccagccgaattgttaaatcattcggaacttgtctctgggtagcctcatataaggtcatgggtcgtcaagattcagctgattttaactatttcccatctatggacggcgtagcaatctggcagtttactgataactaccgtggtcttggcgttgatggcaatattaccctagtcgatttaaagatcagttcgggtaatcaatcaccaaaaaaggtaaacaagaccgtagaatcgccctctcagcatcccgtagtcaagtggaatattggcgctgttgccgtagtaagcaactcaaaaggtgcatatgtttataccagctcaaagctagacaagcgtgaaagtgacaagctaaaaccttgtggttctgtctggcaggtgctaggctttgaaaacggcgctgtcaaggttggcaagaaccaatacttcgatggtcgtgccgtctatgtcaagactaacccgatcgcatacaacgatgccaaacatggcgttgccaagatcgtgatgccacatactcacgccttagatgcaccaaaggcagacgctgggaaagtctacggcttggaacttaactcaaaagttgagattcaagggcgtgtcggcagattcctacgtatcaaagaaaagcacaatggcaagaccgtctacgtcacaggcaatcgtgcctacatcgtgctatagtaataatgattgaaatataaaaaggagtgtgaagaacactccaaatgccgcaagagccgctctgggagatttttcctggagcggctcttttttgtgttatggtataataaaaagagtagtggtattatccgcttgctctcctggttttacttcatgaactttttaataatccatgaagcaattacagtggctaaaatacttgaaaaagtagtagccataaaagctgttatggacatgaaaggatacactttcgtttaaagccccaaagctggttactttgggcatgtgtctagccgtctagtcggtgcttggctcttgctgatctgctgtcacaagagctttttttatgttcaaaataaatatattttagttaattttatttttttattgcatttatcccgatatcgtgatattataataagtgaaaggaggtaaagatatgtcaaagaaaaaaggcaaaaagaaaaagcccactcgtgatgagacttccgaaaagatcgctaagtatgcgatgatcggagcttggagctatccagcctacgaacttatcaaacaactagggcgaatagttctaacacttgtcaaacacaagtaagctttaaagagggaatccgagaggctcctctctttgacatatctaattataccatgacacacaaacaaaaaatgcatcgttatttagcttggagtgtagttgctattctattaggattactaattaaaatgataggaagtgcattctagtgattaacttaaatagtccagatattatggaagcaaaagaagcagcaagaatctggggcgtatcagagagctatgttagaaagaccattagtcagtcacctcaaaagtttccagaaggaacagtgcgtaagtttggaaagcaatgggttgttaccactgagggtatggaacatgctactggtaaaaaagatcctagaaaagtgttataatcaaattgcctattgaaatataaaagaagaggggtgaaatactcctctaaatctatcaagaaagccaccttgggagaaatcccagggtggcttttttattttactcatgatataatttttaacatctcttctgagataacatcaaattttgaaccttttgatttatattgatgtttgctccacggttaatttcgtggggctttttttcttgtggtataatatatttatattactgcacgactattcattgcgaatacagaaaaagggaggaaccgagttggttcttcccatttctgtttttacgtaatttgcggaaaatttacggaaaaaagcttattactatttttgatttatgatgattcaacaaataaaaaatgcgtgcttactgtctatgatgacctatgattatagtatcttaatttggtatgattattgctttgattgagtattgcatgaatcctaaaaactttagagataaaaaagcccatccagaatatattacttttgtaaatatcgctgatttagttaatcagttaggacagatagattatactaatccatcagatccatatactcaacacaacgttttaagtgaatactttaagcatttggaacagggatctattgctaaaaaagaattcggttccacaaatttctcagatgataaggcaagaggctcaattttttcaactgttgtacagaaactagatattttcactttaccgaaaaactcacgcatgaccagtatgaacacactagaaatgaaatcaattggttttccaaaatatttggagtttcagttgcttgatcaacgactatatggtgagttaattaaaatcaattttagagataatcataataaaaaactgaaaacgaatgagattcgtgttagtcaaaaaggatttgttgaaaacaactttgatgtcaatctaaaaacaggaagctttgttgaaattgaagctattgcaggacatacgcgtttgaagaatacttttaagttaaagattaatcctaaagttaaaaaggttgaagtaagtcaggtaggaaaacctgaaattaagatggaaaactttaagatgcattatagtgataagccaattgcagtctttatgaaaattccagattcagatgcttcaaacaacttgctagctacaatttttgttaatcaattatatacagaattatcacgtcagtgtcggctggttcaaggtggaaagacaattagacgagtacaatgtatttttgatgagtttggtagtatgattccgctgcagaatatggatcagattatgacagtttcagcaggtcgtaatattctatttactttagttatccagtcttatgcccagctctacagtaagtatggcaaagaagacggacaagttattaaagaaaattgtcagaataaatgtttgattatgtctactgattcagctactaacaaagaattttcagaagcttgtggcaataaaacgattgagacaagcaatatttctaaagatcaaaatggtttagccaaaaatgtcagtgttagcgtagataaagtaccgttgatactaccagaacgattagaacatttagctggcggtgaaagattagttttgagacctttaacaagaatgaataaatggggctgggcggtagtttcacatcctatttttaacacaggaaaaacattaatgccgtttgcacatacattcttaactgatgactttaatcctaaaactaatccagatttagttgaaaagattgatgcacacgccaatattaatttaaaagcattagaaatcgattggagcaaatggttaacttggactgaacaagttaccaaacaagatgaagatggaaatgcagtagtagaagaaaatttggctttgcaggcgtataaccaatatcgtcaaagtgacgcaaatgttcaagcaactactaaagatgctaaagaagaacaagaaatgaagaagtctttaaaggaagaagaaaatcagattccaccatttatcacgaactggttaacggaacatgatggtgatattagtgatggaacaaaacaagcaatattgaacgaggctataaaattaaaagatgtgcctgaaggacaaaaaccaagttcaatagcttttgttaatatcatctataaagataaaaaattagaagataagaacaaggaaaagaatgagttaacacaggaatttagccaaagctttaatgaatattatcaagataagtagcgataaggactacttatctttttgtttaaagaaaggaaaaattaatgacaaattggttattctatttaactagtttcatcaatcctaagtatcttgatatttttagtagtttggtagattggtggcaaaaatcaaccaattcaggtgattatgatccagccaaattacaaaaagtaactgaagctctacaaaatgcggcaccttatttacattatgatgattttttgggacgtattttgaatcagacaaaatggggcatagttaagatcttttatggatttgccaattgggcaagtgaactagcaacagatagtttggatttctcaggaatcttaaaatccacaggattaaatactaatttaattaatggggtaatgggaattgctgcagggttgatgattttaaccttaacttgggtcggaattaaaattggtacctcaagtaaagctcctcaattaaaaaatgtcgtttggcaattagcaatttcagcgttcttaatcggaaatattcagccaattacaaattgggtggttgatcagtctacaggtgtatataaaggctttgtacaggctgataatgataaagggacgtcaagcttgccatatcaggtagtacaagccaattctaatgacctattagcaatcatagctaataattttagtggcttcaaaatcaataatggggatactaataccaaatgggaaggtgtttctaaagataaaaatggtgaaattaaagaccagagacaaaaagatgttcactatggttcatttgctatgaacaagtctgattttgatactgcaacatcaggcgatttatcaactactatttcagctgatttagctgagaaattaagtaataaagcaaataagtctaaggaaaaaccagcatgggatcctgacaatttgcgttataaattagctcctacaggcgttggtacgaaatcaaatgtaaagggaaaagcatattcaggatattatgcaaccaaagtaagtcaaagcaatactgcctttttcaaaatttttaacggtgggtatgaacgatattcagtacaattcttcccagttgtagttgccttattttcaatgacagttgccttcttactagtttgctttgtttcagtaagagcattcttggaattggcaattatgcaagtattatcaatcattattttctccactgatttggaaactggaaagcgtactaaagctgcggtacaagatatttttagttcagcgttgttaattgcattccaaggctttgaattagcgttctatagaattgtagctgtgtggatgagttcatcagatgcaggaaagattcatgataatccttatctatatgcagttggaatgattgctttaacttgggcactttgggaaggttcaagcaaggttcaaaaattctttggtttggatactggacttaagcaaggctggagtaaagttgctggaggaattgcagcaactgaatatattgctggtaaaggtaaaaatttagctgaaggcgctgttggagttgccagaggttctggtaagttagcaggggcagcgattggtgaagctcaagcttggcaagctggtagctctactaaggctattgctaaggaaaatggagcaagcaatagtgaagcaaaacaagctggcagttatgcaagaagagcctttcgttcagctcataacgactttaagcagaatggtggcagtgcagttgattggaacagggcagtaaattctggcgctgtatctgaaactgtacaagatgaagccgctagaatgatgagaaatggtggtttaactgataatcagtacaacactttacatcataatccatacatgcaaaacagagctgaaaagaatggtggcagtgcagaaccaacaggtattggacgtgatacttcatttgtaggaaatccaaactatgatggcaagaaagaaacagttgcaacaagcaatgttgattcagctaaaaatgtaaatgaccaaggtaagaatacatcagttaaacctgataatattcaaaaccaaggcattaagaccgatgatagcaagcctaaatcaaatgctgctaaggaaagttcaactgacggctctattaagtcaacaggtggagctaagacaattggtaatgatgcaaaaattccaaataccacagttagtgaagcaactaatggttcaaagactggtaaaaaagaaacagcaaatgatcctagaactaacagtgcttctgttactggttcaggttcaaagcgtggtgaagcaaatagctcttcaagctcaccaacaagtagtaatgcggtcgatgaattaccaagcttgagagatactcaaaaatccactagtgagttggcaagtcaacaacgttcaaatcaacaaaccacaccgccaaaaccagttggtgaaggcggtagacacttaagcaatgtttcagactttaagggacaagacagtcatagtaaagtaactgaaactgctggtaccaaccatgtagatattgaaagaaaggctggcagaactgaagtatctactcatgatgtaggcaatcaaggaatgagtagtgtgaaggatgctatgaagagcagcgtaccttcaaacactaatagaaccgttgaaactcaaggcaatactaacacggtgactgaaattaagcatgataagaccacaatcaatcagcaagttgaaaactctactgaaactaaatcaccaagttctaccaacattggcaaattaggtcatggagatagcagaagaaaggattagtgcatggataaatatcaaaaaataatgattcctaagtcaactaatgtatctatccaaatctttttcctagatatgtttgatgtttttgctcttttcattgggggtatggcaggacaacaaatttcttttctatttaatttacaaccgacttggcaattagtaatgacaggttttggagttgtagtaggaattctgctagtaatgcgaacccctctagcgccaaagattagaaattatcgtgttttgttaagcattatgcgacaagaccaaagcagatattatccattatttttagaaggagaaaataatgcgaacaaaaagaaaaagtagaaacagtaggagcaaagctcctagcttgtttagagcttttggcttagataaaggatcaagacaagatgcaagagatcaatcaatagttgaatacttgggctatagtaactgctcaaaagacgggatacttgatttagtagatggcacccaagcacgctatttgcgtgtacattcgacagatttatattcacttgatgatgaaaccagaagtaaatacctagattcatttactacatttaatcggatttatagcaacgattataaaattgtagtcatgtcgacgagaattgatactagtgaacaacaacagtattttcgccatttaaagaatgggattcgttcacccaaaaccagatatgaaaaaatgcgtttacgattagttaatgaaatgttgttgcaatcagtaatgctgtcaagaaatacagaagattactctgatgtgcagttttacattatgatttttggagaagatttgcacgatattagagttaacactagaaccgctcaatttgctgatcaagggttaatgggcttgagaccattggactatgaagaaacggttaaagtactctttagagaaaacaacttgaatagtaagtaagggagaaaaaatgagaatttctagtttattgaaaacaaagagacacaagaagaaaaaggtaactgtaaagctaaatccaagacaagttaccagcttgaaaaagcaaagagaattactaaaaaatggttacaatactaagtttctagcagaagtacaaccgcagggcggtattacttttgcggataattatgcaattgcaagtgatggatatgctgcttgtttatctgtaatccattatcctaatgatccgcttttgctctggcttactcaagtgtcattaaacgattcaacattaactacaattgacgttaaaactgattcgggctatgaaattaagcggcaattgaatagatcaattgaagaattagctgaccggcaagttaatgctagaaaagccactgatgctttaaatgcacaaaaagatatgcaatcattggaaaaatatgcattggaattaagtcaaggtggcgaaattcccaaattaatgctaaccagaatctttgtatatgctccaacgattgaagcattagatcaatcagtttctaatcttcgtggcaagcttcgaggcgagggttataacgttgctgtttatatgtttatgcaagataaacagtttaaatcaatggcattaccaatcacagagcaagaaaaggatttagcagcattgccagaacaaccaattccagccttaacggttggagctggtgacccattttcagctcaaagcttaaaggaccctagaggagtctggttaggtcgtacttcaactgggggagccttttattttgatcaatttagatcaactaatatcagaagatcgtttaatatgatgatcttgggtaagatgggtgctggtaaatcaactttaatgaagatgttggttgaaggtacaattgctagaaatatgtactttcgtggaattgataagactaaggaatatattcctttaattaagcattatggtggaaccgtggttagcttggatggatcagaaggtatgattaatccacttgaagtaatggcaactactgtagatgaaaatacaggtaaggttgatgagctagcaagtttttaccaacatatttctaaggtagatattctattccaaatgattaataagggatcctttgtaaatattgaaatgcaagaatttgattcattgttacgtggattttatgtagacatgggattattacctagaaattttcaacaaaataaaggaaatataaaaattactaatttagatagtgaaaaatacccgacttttagtcagtttttaaattggctaaaaaaattggctacgccaatgtactatcaacaacatcaatttactgctgaaagaataagaacttatgaaaaaatcaaggtagcattggaatcaatgattgagaattacggtcaattatttgatggttattctacaatgagagatttgacagatactaagcttctactatttgattcttctgctatttcaacaatgaatcaaaatgtttatcaggcacaattgtatatggctctaagtttaatttggagtcatgcattgataaatggtagaaaacagaatgctctgttaaaggcagggaaaatcacacgtcaagatgtacagtattttgatgtgttcctggatgaatgtcataacatcataaattatgaaaatatttttgcggttgattatgttaaaaacttcgaacgagaaatgagaaagtttaatgcaggtattatatttgcgacacaatcacccgaagaaatggttcctgattcagtagaatctgctcaactatcaagtttaaaagtggtttttgaactttgccaatacaaatggctaatgagtatggatccatctcaacttaagaaaatcaaaagtctattaggcgaagcattaaatagttcagattacagtaacattcctgacttgcaaacaggacaagcaattgtcacgatgggaggaagagaaagatatcaagtcaagatgaaaccatctgaacgacaacttgaaatttttgcaggtggtcaataatgataacaggtattaagcggttaagacagacaaaaagatgggctggattagccgcttttttattaggaattttagctgttttatcagttatatattttattgtaattttaattgcagcaatgggtgcatcttcagacgatgagtgtgatacaggtggagaacaaggaggagtagttaaagggcgaatcagcgtcattgagtcacctaagtatggtcaaactgctatgatgcatattgcagatgccgtacatgaaaaaacagggattagtgctagattgctgtttgctcaaatgggacaagaaacaggtaatggtgatagttcagttgcaaaacatgatcataactttggtggtatgacttattcagaaggaagtactatcggtaccaaaggtgaaagtcgtggtagtgaaggtggaaattatgttcactacaagaacttaagtgattttgcaactgagtgggctgtaacagttcagaatggttttaaaaaagctggattaggaaaagatgcaacagttgcggaatacgcacatgcaatgaaaaaagcaggatattatactgcagctgaaagcgaatatagagctggtatggaagcccaggctaaaaaatatgatgctctaaaaggcaataaatcactagctaaaggtgatgggtctagtggctcagataattcagctgaggaagattgtaagccaataagcggcaaatgggggtggccattcaagtcaattcctaaaaaaggaccaggtaatacaatctcaggtgagcaattatttggtaagtcatctacaagaacaggtggctttcatgatggtgttgactttggtactgttccatatggtggacaagatattttggcaattcatggtggaaccgttaagaaaattgcatttcaaggacatactcaagatagtctaggaatgtacgtttgggtagaaggctccgacggttggaatgtcatttatcaggaattcggctttgatgaagcagatttgaaatacgtcaaggtagaggtaggcgacaaagtttcagtaggagataaaataggtcacttagcaagtaatgcacatggtattactcacgttcacattggtgcaactaaaaaagattttgctaccgcagagctctctgcgtacaaagatgatggtacttggaaagacccaattaaattaattaaagatggtttgaacaatgatgcagaatctgaagaagatgatggcttatcaaaaactgaatctgaagcacgtgactggattgttcagagagaatctggaggtagatgggacgcagttaacccagctaacccaagtgtttatggacgttatcaattaaagagagaatatcttaatggtgattacagtcataagaatcaaacaagggtagcaaataaatatgtaaaaggcagatatggttcatggcgtaatgcacaaaaattctggatgaaacatacctggtattaatgccaagaaagaaggataaagatgaagcagcagaaaaaggagcgagagtccaatctgaaagtatggatgatgacagctggagtattattcgctgttctgggaatgtttgcaattgccagagttcctaaaaatgatgaactgaatgatattagggcagaaattaaaactgttgagaagcaaatagttcaagagcaaaatagtcaaacaaagaattctgcctataaacaaaagtttgatgtggtgagtgcagaagaagaggcacgtgacaagtttctaaaagtgataccagctatctatactaaaagaaaattttcgtcagctaaacaaaaagaagaatttagtgcttggacaaaaatttttccaggtaaagagggcaaaaacttcatcaaaaataatggagattcttatggttatttaagaaacaagagtacaacggtttactttggtgacttaacagatgtaagtcatactaagattacagtagtaaccctagtcgaaagtgccaataaaaaagaagttacttatggttgggactttgattataatcttaagacccaaagaataaatagctttaaagaaatcaacatagagaggaactaagatgaataaaaaatatcttttaggtggagcaatcctcggaatcatgctcgaattaggcgtaatcaattatgagactaacaagcaaaaagctatcgactatcatgttggtcaggcaagaactgagttggctaaaaagcaagatgagttaaaaaatgtagatgctaaaattggaaattcgcaaaagcatattgctatgaaggaaggaggcagcaaagagaaactagctgagcaggatgtagcacagacaaaagccaagaaacaggtaagtaaactgctaaaactgctttacacgtatgatagtggtgatgaaaaattaaaaataccagacaaggtgaaagatacacatttagtaagtgaaaaagtcttaaagaacaattctatgtttaaaaatgataagcaattagagctccaatatagtggggcagatatgacaggtcagattgatgaactagatttgaagacaggtattttagaaaataaccaagtgcctgtatatgccaaagtttattttgaaatgacaaaagatgatagaactttgggaacaccaactgatgcttaccagctgatttatgatacagcgactaatcaaattacttcaattaagtattttggtcgctatcaaattgatcgtgaggcagattaagatgcaaccgaaaaaagaaactaaggtaaaaatcattgcagttagttgtgcaatgatttttttgttgttcataggagttattggttttaatcaacatgttaatcatgaactaaatcaaaaaaacatcgttaaaatcaaaactaatgatgactcaacagttttattttatcgagatgactgcaaaagctgtcgttctattttttcatacgctgtaatgaaaaaagatttatttagaaagaatatacagtttgtaaatactaatcaaccacaaaaccgacactatattacggagtataagttaactaaggtaccaacttttatccatttaaagtatggaaaacaagtagaaaaatatacgggaactaacatagaaaagatagatcaggtcataagaggtgattaaaaatgtctagtcgaattgtatatcaatcagaaaaaactaaactaaaaaaatcaaatcatcgtttgaaattagttgccttagttttgtttttgttatcagcagcacaactaatggcaacagtttactttaatcgtgataatccagattcagaaagtcaaagacaaattcgagatcaacaggagcagattactgaattaaaacaggaattaaatgatagcaaaaactatcgtgtacattcggatgacaattagaaaggcaaaaaatgattcaaagcaaaaacaaaaatgaattgaagcgacaccaaaaacataagtatcgcaaaatttatttatcattcattggagtggtggctgcaatttttattgcaatcgttgctagtccctattggacaggaaaatcaattgacactgagcaaactgttaatgtagtgacaggcaattcatcattttacctagcaaattctatttacaataagcaaagcgaaaagatgttgctagagtattatcttggggactctacagacgtaacatctactagtgacgattcagacttaagcaacttaaagtatgctataagagtagtaaacatgtcacgtggcggagaagatggagaagagcttgcgatcaaatcacagaaaatcaataatcactttttagtaattgaggttagcggaatcaaaaatggctttggagatttaaagattgatattctgccacaaaaagttaataagcgagttaacatgcaagatttctctgaaaataattatattgagttcttcattaaagagaataaggttgatctgacttcaagcaaagtaactaagagctatcaaaactatatccttgattatcgtcaatatctgattaattggaataaaaagaagattagtcaagaacaaaatacaattaaggatgctcaagctacgattcaaaattctcaaaataatttagattctgcaaaggcaaagttagaaaaagttggtgatagtcaaaaagaaaattaccaaacacaaattagtagtttggaaaatgatatttcagaaaacaaagcagctatcacacaaagtcagcaagcaatttctaaatatgaagacacaatcagagacattaaggacggtgattttgataattaggtgcaaaatttagctaaaaaatgttacgtcttggacgtaatgagctacgtaagaatacgtcctgttcggatatcactaaaaagcattacgtatcaagacgtaatgtcaggtaaaagacgaacaatttagaagtatacagacgtcaaattaatcagaagtgatatcacttctaaaaatgcgaaatcgcttggtacaaccaagcccagcacaccttgataaaaggcgtggggtcagatttcccttatgctctttactagagataactaaaagaagcagattttagtcaaatttcagagtagaaactagaaggaaaactagaaactagaaatcagaggaaagaaaaattatggtaaaagttttaatccgtggaatcagcgaacaaaacttggctagaattgatcggattgttaatcaattaaatcaaaattcaagtaagaaaatttccagaaatcaatttttgagagaacaaattgaacaaattccaattaattttcaaaatcaaaatgaagattcgcaaactagtttattgattcagaagcagaataaacttctgcaggaaaatttattagggctgaatgttcttgcaaagtatttcattagtggagatgttaatgacaccgaacgagcattaaatttgttagatagtttgtcagaagacacggcaaaagaagatgattaaatttagaaagagggcaagaaatgggacgacagcactttttgcaatttcgactcaacgataagcaatggaaagaaattaggcagattagaaaagaacattgctttgataataatggtcaactttataagttcttattcttcaatgccatgttaggtgttcaaaaagaaaaagaactggaagagttacaaaaaattaatcaaaagattgataatgctttgaaaaaaagacaagaaacttacgctgattaagaggactagaaaaaatgattaagacaacttttagagcgacaatttctgatacagatttagattggattcaagattataaagaggaacacgatttaaaaaataatgctgaagtaattcatcatcttatgaagttagcagaagaaaatgaaaaaaattctaagtggacaaaagatttaagtgatattagaaaacaacagcgatttaccaaagaacaagttgcaattctaacagaaatggtaagtgagtttttgatgactcaaggaatgcaaattgtcggaaatggaattgatgcagaagtttataaatctgcaaagagaaaagtaaaagaaagaattaataatagaatggaggaaaatggcggacaacttgagtaagttttgatgctgagattgcgattctacggcttttaaaattgaaagagcaaaataattaatcaacttgcttcatagaatttttatttgtaggaggtaatttttgggacgaccagctataattttaacttcaaaattttctgtgccgagttcacgaaaagcttttggacgttacgttggatatatagccagaaaagaagcattagaagaaaaagaatttttaactgcagaagaaaaagatgaattaagtcgagttaaaaaacaagtaagaaaattaaatcaggaaaacaactttactagagtaaaaagtgaagaacattctgaacgagaagcagctgctgagaagttaatggaaaagagaaatttttttgatttgaatgataaggaatttgataagtatcttgggtatatggtacgaattgatgcattaaatcagaaaaagaacgaaacgggactaaataccaaagaacaaactgaattggaaagaatagggcaagctgcaagtaagctgagtgaaattcatccaaccaaagaaaaagttttagatggagtatttagctctgacaaagatattgttcagttgaaagatttagattatattcgtgagcaattaaatgaaggacaagagaataattctgtcttgtggcaagatgttgttagttttgataatagttttttaaaaaagaaggggattttatctagtacaactggaatattaaatgaggaagaactacaaaaggcaactaaaaaaatgcagagtatttttcaaaaggaaatggatccaccattaaatgagatgtactgggtggcttccattcatagaaatactgataatgttcatattcacattgcaacagttgagaaagacccaagaagaaaaattataaaccgtgaagggattagtcaacctaagggtaggcgaccacaaaaaataattgatcatatgaaaagtggttttgcaaatgaactgattggttcttcagagatgactaaagaattatctcagagacgtcaagctattagagaagcaattcaggttaatttgactagtcaagttgaacagccaacttttcaagcagagataaatcaatttgttagagcattgcctgagtcaagaagagaatggttttacaacaagttagataaaaatcaaaaaaagatgtcggatcatttggttgatgaattgctaaaatataactccgattttcaaaaatataaagacttagtttggaaaatgcaagatgaccgacaagacttatatggtaaaagtaaacgtgaaaataagaattatgcaattaaccaactatatggcaaagaaggaatttatgcaagaaatggtaacgcattgctagctgatttaagaaaaattgataagcaagctaaccataatcaaagacataggattaattttaaagataaagttgatccaaacgaatatattcaatccgcattgaaagaaattagtaaggatacaacaatacaaaataataagataaaatcaaatgacgactatacacttcattcacatattattaagcgtagaaaaaatctaaaaggacatatttacttaaaaaagccttttatcagtcaaagtcaaatacgaaaaattaaatctaaccaagaaaaagtatttgaaaagacaaatgcagatattgaaaccaagaagaacttacgtgaatttgagaaattgcaaaatgaagttgaacgagaattagaatagaatcatcttaatttgtgactatatagttagtcgggtataggtggggaaattagcaagtagttttactacttgcttttttgacgttaaagaataggagaaaaaataaatgcttacttttacaaaggaacaaattaaggcagctaattcagcgagtattgttgaatatgcaaggagtgcaggaattgatttacgtcaaacaggcagcgatgaatttaaaggggtagaacatgattcattggtaattacaccatccaaaaattctttttactggaattcaagacaagttcatggaaaaggtgcattaagcttttctacattgtatgaattgtcaggtagcaatttaaatgaaaaagagaaattcctaaaggcaatggataaggtgttaactagtggagtaggtgatggcaaagtttatcaaattaaaaaagaacctttcaagtttgataaaaatcaaatagattcagaaaataaaattaatcgagtatggggatacttgcacaatcaacgtggaatttcgagtcaaactatagatcaattacatagagacaaagtgcttgcacaagataaattgggtaacgcactttttttgtggcttgatcctcaagatagacgacaagttaaaggagtatcaaaacaaggtacaaaaattaatcatcaaaaatatggtagaagaggaaccctcaaaatgattgaaaaaaattctaccaagggatatggtttttcattcgattcaccaggtatgaatggaaaaactccagaaaatattagattttttgaatcaccaattgatgcaattagtttctttgacttgtctaaggtaaaagtaaagggtggaatgaaaaatactaggtttgtttcaatggatggccttaaaaaagaagtgtttgactcgtatataacacaaacagcagcacaattacaaaaagaaggtcgaattcttaaaagtgtaggtttaggtgtagataatgatgaagctggaaaaagatttgttaaagatattcaatctaaatttcctaaagttaaatactgtaaacctagtgaaaaattaggtaaagattggaatgacaccttaaaagcttttcggaaaatgcaacaaggaaaacaaaaatctaagcatacaaccagaacattaccaggacaagaatttgaaaagcgatcggcttatttgagaagagaccaaggattagaaagataagcatatagaaaaagcagttagtcagtgactagctgctaatttaatgcaaaaaaagaagcacataccgctttccgtatgtgccgctctttaatgagtctcactgatctattcctcgccttctttaagctagcatatcgtcaaggcagtgggcaacatgatcaagtaatgatccttaatttctactgctattcttaaactttttttaacacatattcaataagaaaaagtgtaaaagaaaagtccctccaaacatcgaaggactttttgaaaagcaatgcactacgctctcttttgccatacgacaaggcagcgagccacctgaattgaaaattcaaaaccttaatttgaaaattgcttcttcaattaaatttattgtagtgtaaaggagaaaaaaagtgaagagattagaacaaactttgaataagcaggttaaatatatacctcatggatatcatattatgcgaagaagagatcaaagattagaaagataaataataagaaagagcagctaatcaaaaactaactgctaatttaatgtaaaaaagaagcacataccgcttgcgtatgtgccgctcaaaaaacaaggattattaattaaatagtgctaaaattgtaagtaatctaactaaacggaaagtaagtgagaacaaatgagtgaaaacctagaccttgcaaacttcatagtctcttttggtagtatgaatgactacagtagtactgtgttgcaaacaaaaagagccttagatcttaatgacctatctaagcttgtacatcaacaccacgatggtgccatcttaaaagatgctttagatggcatagctgcagcaaagaaattcggatttacaagacaaggaattattgaaattaataaagcctttacccatagcgaagaagaagacccaagtattccagggcgcttaagacatgcaagttataatccagacgacgcaattgtcattatcacagaccctaaaggcacagctaaaggtgcatactttgctccagaaaacgtctaccccgaagacttagatgaaataattgaacaatacaactcgtctaaacagactactaaagatgcgtggagagtatttgcaagcttatccaagcttcaaccattccaggacggaaataaaagaacagcgctaattgccgcaaactctgctcgagatacctgggaaaccagagattatttaacccttccttttgacaacatagaccacgctgaatttatgattagcctcatgagattttatcgtgcagatactagagaacaagaagacaaagctttggaccgaatgatagaaactttacctagcaagaacgaagttgcgtatcatttgagcaacgaaatttcgcaaaaagatattgacattaatgacctaaaaactaaaagaattaaatcattctaccaaaatcaagaattagataggtaacattaaagaatcgcaccaaggcttaaatagatggtataaaaaacgctgaaatcattgaattatcaaaacttcagcgttttttattctcagctaagacagtaaattatcttcagcagaaacgtgtaaatttaaaattactagaaagaaggtgatagtagtaaaaactaaataacttgtatgtagtcaggacacttcattatgaagcgtcttttttgttttcttagaaaggaaaaattatgtcaacacgatcaaatgtatcaattttaaatccaaatggttcagttactactcagtattttcatatggatggtggacttactttcacaggacaaaatttactagataattatcgtactttagacgatgccaaaaagttaattgaaacagggaactataacgataaccatattccagaaaatcctacagctgctactaaacttatggatgaatataattctaatggacaaagaatcgatgatcctgttagaaaacagtatcatgacttatctgcgatgattaacgatatatcaaagaatgacggtaagtaccttaattcagatgtagagtatcattatcttttttcaccaagcgctgaaggaaattatcaatggcacacgattaatcgaaatggtattaagcccctaactcaaaaagttattgatagtgaaaaagaaagtggaactttagccgatgtagattggaataaatctagttttacttctgattgggcagcaccattaactgataaagagatatcgagtcttaatgatgatatttcacttcagtcacaatatcttgatcgccttcaaaaatcaaaaccagaattagtatcaggtcaagttaaagataaaatggatatggataaaaatgctttaaagtctgaaagacgacctagaaagacttttgaccgtaaagcttggaaaaagaaacatactcaaaccgttgaggatttaaaaaatggactacttaaagaagtagataattatactcaatcaccagagaaagttgtagaaatgcttgattttatggataagtttcataactattcctcaagaaatgcaatgatgattcagatgcagcgcccaggtgcgactgcggtgggatcatttgcaaagtttaaaagcatgggctataaggtcaacagaggtgaaaaaggaattaaaatatttgttcctactaaagctacagttttctatcgtaaaaataaggatggcaacaaagaattagctaacttaaagactgccactaaagacgaaaaacaaaaaattgaggcgggtaatatagaaacttaccaaaaaactttttataagattggcactgtattcgatgctccacaaaccaatatgccaaaggaaaaatacccagaactttaccctaatagacaccaagattttaatatgaagaatccaggacagattgactccttagagaatggattaagaagtgtagctaatgacatgaaaatgccagtcattacttatgacccatttaatgcagatattcgggataaatataaggatacgcaaaatgctaagggatactttaacagggctactaacgaaattgtgttaaatggatacaacactccaacggagaatgtatcagtgcttgctcatgaattgggacatgcacagctacataatagccaaaaacaagaaaagggcctgcctagagaattaaaagagatgcaagcggagcttacaagttatctttattgttctcattatggaattgatgttaagcaagagacagttgattatatagctaattggacaagcaacggacaaaagtttaatgagttaccaagtggggtaaaagggcaaattttgacgcatgttggttcagctactaagacactaactaatagtaccgataagttactcgaaaaagaacaagaaaaattgggtcaaattgtcaaggaaaacttcttagatactcctgaacactcgcaatggtatgtgcaaaaagaaaaaatggagcaagaagttactgacaatgagactaatggaactaattttaagaccgaattgacggcactaagaaaaatcgaaaaaagtatgacaatagatacagttagaaatttggatgatgcatttaataaaacgcagtgctggacagcagatggcaactatagcaagttaaccgacaatttacaaaatgaaattgaaaaaaatcaagaaaagtctaaattgcttgatgataaagaagtgcaaactagcaagccacatgttgctacagtaaacagttcactgaccaatgaaaaagcaaaagaaattgctattcaaaaaggtgaacaggaattggatcgttaaaaaatatcaaaaatgcaaaatttgatatgaggattgcaaagcagttagtaatttattgaacaagtggtgagtaaataattttctaaatattactcttatataggttgattccattgatttagtagtataatatcagtataaatgatatgaggggtgcactactatggcttcaattactaaaaagagaattcaagtacaaattgatgatggtgtggtagaagaaggcaatgctgttctaaaaaaattaggtttaacacctactattgctatcacaatgttctataagcgtcttattgctgagaatgggttaccattttcaaccaatttaactgaaagagagaaagatgaattagaaattcaaaacttaacaaaagattgggcaacagaagacctggatagccctgagaaactgcaagaatggatgtcaaaagatgagtaaaaatattgctacagcatatgttcgttttgttcaggtttcaggtggtaaaagacggccaattttcatattacaggaaactgaagataaggtctttttctttgatataacgacaaagtttaaaaataaatctgaagaaatcaaaaagcattattttgaaataaaagaatatgaaaacacaggtttaaaaaaacattcatggattgatacttatagacgttactcggtatctaaaaaagatactaatgttaaacatataggtagattaagcgatcaagacatacatagattagttaagtttcttcgtaaaaacgctaaaaaataattttatgttaaaacagccagctttaaagttattgtatttaaagctggctgtttttttgagaccgtaaaatagtttgtgtaaggatgaatgattccttaaatttatttctttaaacattagaaaaaggagttcctttctcgtatgattggtttgaacaaaaaaacacatacagaaagaagaactccttcatgaatgattttaccaaagattttgctcaagctctattcaatccagacaaaataaatgatttattgcgcaaagagctacaacaggctgttaataacttgctagaagctgagttgactgcctttctaggctatgatccctatgccagaaatggctggaatactggcaattctagaaatggtgcttatttccgcaaggttgatacccagtttggaccaattgaagtgcaagtgcctcgagaccgcaacggtcagtttcatcagcacacgctgcctgactacaagcagcactctgatgttttggaaagcacgattatcaagctctactccaaaggcgtaactaccagagaaatcgctgacttgattgagaaaatgtatggcagtcattatagtccagctcaagtatcaaatattttcaagcagatgctccccaaggttgaggcttatcacaagcgcaagctaagcgacaagtttttctgtgtctatttggatgcgacataccttcctttgcgccgagaaacgtttgagcgtgaagcagtatatattgccattggcattaaacctaatggacataaggaagtcattgactactgcattgctcctagtgagaacattgaagtctggacagagatgcttcaaaacatgaagtccagaggcttgaagcaagttgaactctttctttctgatggtgttgttggcatgaaaacagccttggccaggacttatcctaaagctcattttcaacgctgcctggttcatgtcatgcgcaatatctgtgctaaagtccgggtggatgaccgcgaaaagatcatgaacgaattcaagcagatacatcaacagacaagcaaaaaagaagctgcagctgtcttgcacaaattctatgccagatggaataaagcttatagccatgtcatcaaaggtttgaaggaaattgagcccgatctgctggtcttctacaattatcccaaacaaatcagagcttcaatttattcaaccaatatgattgaatcctttaacaacgtcatcaagcgtaaagctaagcctaaggcagaatttccaactgaacagtcgcttgatgcatttattggcatccaggcaatgagctacaatgaccgctatttcaaccgaattcataaaggctttggtcaggttcaggataccttagaatcttattttgaataaataattaaaaaatcaatttgcgagaaagaactatttacacaaaagatttgacaggttccattttagttagtgcaatattgtatactataaatgtaatatatgatataaataagatgcttatattatggtaaggagaaataataggcagttatgaaagaagtcacaagattagaagatatattgttcaacgttgttagacctaataaaaaaggttatgctaaggacttagccaattcctattatgtaattgatatcgttcaaccagcacaacttaataaatcagataccttgattgtgatcaaaaagaaattgattagatatggttttgatgtcaaaaatctaaagcatgatcaagctagtgactttattacttacattaaccaagattatctaaaaaattatggttatgtaattagtgacaagatttatcaggaagaaaaagcaaagctagagagcaagggaattgacttctacttctactctaagtacctcaattgtaacaatgatcaacaattgtacaactactttagaaagatgattagtcaaatgaataaagtcattctggaaagcattaaccaagttaactagtcttttatatatcacaaaaatgatatataatataaatgcctccattaatctatttttggataatgagtatgctatgtaaagaataccgtgaggtattctttttttgtagaaaggaatagtaacgtgacaagattacttattttaaatgaaaaaaagtctcaagcagaaaaatttgcggattatttaggtggaatgagtggcgaatttgaaggaaatccatatgatattgtttatgccgcaggacatttattacaactcaatgcgcctaatgaaatggttgacccaaaccttgcagctaaatatgcggattggcagaatttagataactttccttggaatcctctcgatttaaattggtcaaagcaagttattaagtccaagcaaagatacattgataatattaagagtaatttgcctggacatgatgtaattattattgcaagcgataatgacccatctggtgaaggtgatgtattaggttgggaaatagtagattatttaaactggcaaaatgaagtctggcgaattcgttttaaaggtgatgactcagctaactatgtaattgattccttacataagcctgagaaggctacagttagtgaacaagatgctcaaggaattttagtaaaaggaaaatcacgacagagatttgattttctaacaggattagaagaatcaagaattgcaactgagttggcaagagaacagggttatagtaataaaggtaaggcgctttcaataggacgcttgcagacgtatattacgtgcttagttgatgagcaaaacagagcaagaaaatcatacgttaaaaagcctttctatgaaataaggtataaggatgcaaacggcaatacatttaagcgtgactatcaagacggtgatacttggcgtttttcagacaaaaatctagtaggtcaagatttaactaattattctcaagatcaaattattattgatagcacaactgaaaaaagaacccagccgccaaagttagtcaacttggctgacttaggtaagattttccaaaaggaatatacaactgaacaaattactgatacttatcaaaaaatgtatgatgataagattgtttcttatccgagaacagaagacaacgcaattacgattgatgattttaacgagttactaccatatgcagataaaatggcagcagtcgttggaattgattcaaaactcttaagtcataaagacccacgcaaaaaattcataattaagagtgaggatcacggagccaatcgtccgaccaaattagtaccacaatcacttgaaaaagttgaagacaaatatggtaaatgtggtcgagatatttatgaacgagttgttaaatcatatctagcaatgttagctgaggactatgtatatactcaagttaaagcccatattgcaaatcatcctgattttacaagtacgattaatgttcctaaggaactaaactataagctgatttttaacgaaaatgatttaaatgaagaaaagcaatcagaaaataaggctacacattttgctcaaaacgctagccctgaagtatatcaaggtacaaatacgccaccaactaaacctactttaactttcattttgaataacttggataaatggaacttgggtactggtgcgactaaaatgcaaacaattagtaaattacaagcaattggtaaagaaaataaaaaagttattccccaattaaaagtagtaagaggtgtttttgaagtaacaggaactggcgcattgattgcttgcttagctaaagatacctatttgtcttcaggaaaaattacaaaacgcttgcaagacattttgaatgaaattaaggctgatcccacaaagcaagatatggtctactcagttgcagaaaagacaattgaacatgataaagcagttatgatagaaaatgccccattattaaatcaagatgcacaagttaaagaattagctggtgatttaaaggcaattgaaagatttagcggagtctttactcaaacaaatgaaacagtaaacccaccagttacgatttttgatggacatacgactactgaagtggagcaacaagaagctttagaagggaaacaaatcacctattcgattgaaaaatttggtaaagaagaacaacatacggcttatttagccgaacaaacgtataaaagtaaaaaaacgggtaaagagattaccagagttggttggaaagtagagtttcctgaagatactgatcacgttaaaggaatctataagcctttagctaaagagattaaatttaaaaaagaatatggacaacatgcttttagtgaggaagaaattaccagcttgttggcaggtgaagaaatcagttttgaagcgactgataagcaaggaaaaagctttacggctactggaaaattgatagaacaagaattgaaagaaggtagacgtaaaatcaggttctggggctttagagttaatcctaaacctgtagatacaaatgtctatgtagtgattacatataaagacggtaaagaatatcattttaagaaaacatatcgaggtcatcgttggacccctgaagagattaagaaaattgcggcaggaaaaaagcaaattgtagctttcaatggtcgtaaaggtacctatcgaatggagattaagcctaatcccaataagaaatacaatggcagaaaatattttggttttgatgagaaatttgctaagtagaggtagtttatgaaaataaatatgattttgtcctttctaagacgaacagcactgtttattgcaactatgtttgcattttttgtttctgctaacgcaggtgctttggcgcaatcaatttgcaaggtttctacgaagcatttaaattccaatattaattttgcgacggtcggctttggtatttcagtaataatttatatttttctcttgtcgatagggtatctaaaatcagacataaaaaaatcaaaggaactaaaagatgaaaaaaaagattcttgataaatcaattggtattggtcaaatgatagtaactttccttatttatgcggtagttcaaggattatttatgattagagccaaacaattaagctgggttgccgctatatttatatttggattaacggttgcattactgagcttgacctacggaatttaccaaagaagacttaatcaggtgaatgattggcactttactagttacaataaaactagaatgccaagatttactttaaaaaattggagtttagcttttcttggatttttagtaatttgtattttgcaaattttagcaggatttttgattaaaggggaagccactaatcaagcaaacatagctgcacatcagcaacagttgaatccaattattaatgtaatgctgattgcaattggaccactttttgaagaaattatttttaggggtattttctttaactggttctttagtaagccaaatagaaagtcaacagtctacttagcagttctcgttaatggaatagtctttggactgatccatgaaccgcaaattgatctatataccattttgtactcgctatgtgggtctgtcttagctttagtttatcttgaaactaaggatttgaccttctcttacgtaagtcaccttggcaataatttagccgtgttcttgataagcagtttataggagaaagtatatgaagaaatacgagtatgaaaaagccgcaaaagctcttttaattgaaggtcattataagctggtagatgagaatataaaatggatgcttcattcgcttaagattagaacaaagcgtctaatgatatatcgaaaatgcagtgagcaaaaagcgcttaatgaaattgtacaaataacttcaggtgctttcagtaccgaggactttagacaatattatgatagccacttgatttcgtgataacatacagctaaagcattaagtatatttgctctaaactttggtgaaacaaaaaatcgttactcatttgtggacttagagtagcgatttttgtgtgtcgtaatattttcgcatatgcaagatgtttcttcttttgtaccttcatattaccatgattttttattttttctagacttagtgctctttctgacagcttttcaataggaatcacaaatttagttttaaataaagaccaaatgcctaagatcctaaaaaccatttagtatggcaaactattgttgacatgctatataataaaaaaagttaaaatattgacattcacgttataacatcgtattattgcgttataacaattaaatggcaaagcaggtgattaaaatgttacaagatacaactaaagtttttaaagctggtaattcattgagtgtacgtttaaccaagcaagatttaactaagtttcatgtagaagatggaacagttcttgaaaaagaatatgatcctaatggtaagaagatcacgtttaaaatagttgattcaattaatcccaatttggacaactttattgatcaattttatgaagaaaataaagaattaacacgagagttagagaataaatgatctatttaaccaaaacagatttaatccatttgaatcaacggttgcttgaaaaagctggtaaaggtactgtaggtgtgcagtatccagaggggttagacgttgttattaaacagccacaacaaatattatttggacgtgaattatatccaacattatggttaaaagcggcttttatcttacagaagattactaaaaagcatatcttcgctgatggaaataaacggacttcctattatgcagcggcgttttttttacaagaaaatggatatcacttaaaagctgataaagacgatgcattaaagtttattttatatattactaatagtgaggattcagaagagaatatgtattttgctgcagattggttaaaggtgcattgcgtcaagattaagtaagtatattagcaattagaattaataaaatgtaaaagttgaatttttgctcaaaatagccataggcgtaaaatccataagcaaaactcaagaaaacatcacaagcgtcactatccttagccaatgcatatagcttttttgtcttaaactttggtgaaacaaaaaaatcgttactcatttgtggactacagagtagcgatttttgtgtgtcttaatattctggcatatgcaagatgtttcttcttttgtaccttcatattaccatgatttttttctacacttagtgctctttctgacgactttccaataggattcacaaatttagttttaaataaagaccaaatgcctaagatcctaaaaaccatttagtatggcaaactattgttgacatgctatataataaaaaaagtaaaatcctatagttagtggaattgcccataaaaagggtattagatagataatctaaataacatgtaagaaaggaaatacatagatggatgaattgagattagcactatatgatgatattgcacaggtggatgaacctgttcttaaattaagtaaaagctatcaaacaaaatattggcgtggtattgatagcgacatatctttttccttaattttaaaacgtaaaaatggtgatattcagttaattgtggatcaaggacttactacgattggcgcaggaagaaatgatattggtcttgatgaatcgatgttgatgacttatctcataaaatttaatctaaataagtcagagcttctgagatataaaaaagaaactgataatttaaatagcttggtaaatgatcctgaagttgtaggacttgatgataatgaagctaaagaaattaaacaagactggattaatacccaaaattcgcttaatgatgcaatgacgagcttgatgaatcaagttattagctgggttaaggctaattataatgaataccctgtttttgcataaattgtaaatagataaattaattgaagaaacgcaggactaacaccaaacagaatcagctaaaaagttacatacaactcaatcaaccattgcaagaattgaacaggagaataaaatggttagatcaattgaagaaaaagtagaagaatactttaagagtgaacttgatagtctaggaattaggcattacggtaaaactggagaaataaatagtgaaattacatcagccttgcgacaagctgaatctaaatctggtggtgcaggcaacaattatcctgatattcaattattattagaagataatcattcacgaagagtaccagtaatgattgaagctaaaggtggcaaaaataagttagaaaaattagacaaggctggtcaaattgttcaagtgactaaatttggttcaaattctaagccgaacgcaaaaaatccacataaaaaaggtgatcctaattatagtgcaattactacatatgctactaatggtgctctgcattatggaaatgcgatcttagataactcagactgtgatgaagttattataattggaattaacgggactactttagatgctgaaggcaatttaaaagatcctgagcagaaagcttattatatttctaaggctaatgctggtgttccaaaacatattagacagctagattcatcgtttgatttgtttaagcaaatcaatatagataccctttttggcatattagacaaactaaatctaaatgaccgtgaactcgaaaaaattaaattagaaactgaggatgaattagaaaaaaggataaaatcaattcatcaagctttgtacgacgataagtcaattcaaaacctactgacaactaatgaaaaattgtatgtttttactggtttaatcatggcggggctacagacaaaaggagtatcacagttagagcctgctgaattaaaaggaaacataactgaaagaaacaatgatggacaaattatcttaaatcatattgcagatttcctaaatgcaagaaaagcggaaaatagcaaaattaacatgattatggctttgttacaacctatttttactaaacaagctttatggcaacctaaaaatggtgaaagtttgattcataagatatatgtgcaagtctataatgatatacttcctttgcttgaatcaaatttgcatttagattttactggtaaaattttgaactctctaaatgattgggtatcaattgataatgaccgtcaaaatgatgtggttttaacaccaagatacataacgaatatgatggctaggttagctcatacaaataaagattcgtttgtgtgggatttggcaatgggatctgcaggatttttagtgtctgcaatggatattatggttaaggatgctaaaaatacaattcaagataaacagaaactagagtgcaagattcaaaatattaaagaaaatcaattactgggtgtagaaatactgggcaatatttacattttagccgttttaaacatgatcctaatgggagatggatctagcaatatggttaatggtaatagtcatgagctgtataaaaattacacacagtttccagcaaatgtgtttttgctaaatcctccatactctgcagaaggaaaaggttttatttttgttcaagaagcattgtcacaaatgacaaaaggctatgcggcaattattattcaagaaaacgctggtagtggcaacgggctgccttacacaaaaaatattcttaaaaataatactttagttgcctctattcatatgccaactgatttatttggtggaaaagctagtgttcagactgctatttatgtatttaaagtagctagaccacatgaagaagatgatttagtaaccttcttagattttagtgaagatggatatactagaatgaaccgtaaaaaatctggtcagaaggttaatttacgtgatacagatcatgccaaagaacgttatgaagaagtagttgcaattgttagtgataaaaagcctaaaacgaattactatactgaacgaaaccataaagtaattaaagatacaatcactctagaaggcaatgattggacttataaccagcatttaaaaattgacacaacacctgcagaagaggactttaaaaggactgtggcagattatctatcgtggaaggttagtcaagttataggtggtcagaatggttaagtataaggaatttaaattaggtgatttatttgaaatacaaaaggtaaaaggtatcaacaagtctaaattagtaaatcctaatataagtacaaatgaatatgactatgttacccgaacatctttgaataatggcattgaaagcacaacagactttgtatgtgatgtcccctacaatgaacctaatacgtttagtttggggctgttacaaatgactttcttttatcgagaacgttcttggtatgcaggacagttcgtaaggaaaattattcccaaatttaaacttaatactaaaattgcgttgtactttaataccatttttagtagattgtctaaggtgttactgtctgttcttgttagacacgtggataatgtgtttagagactctaaggtgaggctacctgtaactgatgcagatgaaatagattttaattatatggaacaatatatagccgagcttgaacagcaacggctcgccgagcttgaacagcaacggctcgccgagcttgattcctatttaaaagctacaggattaaatgactatggactaactgatgaagacaagaaaatattagcatataagccaatatttcaagaatttaaaatagttgatctatttaatgtagttaatactcatagtatattgaagagtcaagtagctaaccttgaaaatggcaatgtgccatacttgacagcagcagaaggcaataatgctgttttaaaatacataaattgtcctaaagaatggatcgatgagggcaattgcgttttcattggtggaaaaactatggtagtaacttatcaagaaaaagatttttgttcgaatgatagtcataatttggcactatattttaaagattcaagatataaaagccctctaattcaacaatattttgtaggaagtgttagaaaagctttatctaaaaaatatagttgggatgactccatttcaaaagccaaaataagaagtgatagtgtaagattaccagttgtaagtaatacaaaaaatttagactttaattacatggagaagtacattagagcaattgaaaaactgacgattgctgaggctgtaaagtataaggatagagaaattttaactactgaatcactaattaataaaatgtaaaagttgcgttttagcttaaaaagccctgtattacaggattttttcttaatgaagtagaagtttataaaatttttgttgtaatttgtagtacttaaagtagttctaccgtcctttttaaagtcttactactatgattttttcttttttctacatttagcattgtttttatcgatttttcaacatggtgagcggagttttaaaaagaataaaatctaaatttctaattcgtatatcaaaatacggatatatcaaaaatactgatatatccgtatttatatagtttatttttctttaccctcaaataggtctccatgatttccgattctcacaaatctaattattgaattggtcttgtgtggcttgtagatcactacaacatcgaccgttccttcacttaaatgataatcaaaatgaccactgtaattaccaccacgtttatctaacggatgaaggtcatagtcctttccgacttttcctttttgggttaactgaataactgtattcttaaaatcttttattaactctggatgttcttttttgaactttttgtagtcttttttaaattgtggctcgtatttgatagtgtacattagttctcatccaaagatttcattaaatcattgacattagtaaaactaggcgaatcatctgtaaccaagccctcatctttggcatcagctagaagcattgctttttcggttgttttattaggaatttctggttcagtcaagatttcaaaaggaacttttttttgtaaaaccagttgtttagctgccattacaaagtatgcattcattgaaaggcctgcagcatctaaattcttttgcatttttctctttaaatcgtcatcaagacggattgtagttgatgatgtcataacaatcactcctttacgctatgacatcattataacatacaaatgatgtcattatggtacaaataaagcttaaaaaatagaaggtgttagaaaacagcaattttatcttttttaattttacacttgaattcttataaaaataaaaacgatagttgttgaaatattataaatatgatatataatataaatataagctaaacataaataacttatacatagcatatgaatatggagggaacaattatgaatactatttctaagcataaggctaacaagtttgataaaagctttgtgggttggatgttagtaacacaggtagtagtaattgctgtttcggcatacctagtttcaacaggtttctttgctgcgttaccagtttaaattaagcataagtaaattatacataacgtatgagtacagtataattaaaggagaagaaaatgaagattattacttttgcagctattaaaggtggagtaggtaaaaccacattagcctataactatggcgaatggttggctaaccacggatcacggattttgtttatcgacttagaccatcaatctaatttgacccaaacatatcgaatttatgataatgagtatacagtaggaaatattttcttaaagaatgatcaagttaaaatccatcagattaatgaaaatattgatctaattgcaggagatatgcatttagacgatattgaagcagacattgaaactaaagtcgataaaaatatgctgctatacatgtggctagcagataattatgacactagaaaactagatcaatacgattacattattattgattgccaccctgatttttcaattgcgacaaagaacgcagtgattattagtgatgatattcttagccctattactccgagcgaacacggttatagtgccaaattcaacttagagcagcgctttaaggagcttaaacgagaaacaatcgattatcgtacgagacagtcgttagtagatgcaaaattactatttgttggaaacatgattaaaaacaacactagatcttctcgtgaattggtagaagttttacaaaaagatccaagtgtcattgttaagattcccaatcgagagctgtttaaccgctccactttagataaagtggcaatcagtacaatgatgaaagataaaaaaatgcaatctaggtatggatcatttttcaatgagttaaatggtatctttggctccattacaaataatgtgagactgtaaaatagtttgtgtaaggatgaatgattccttaaatttatttctttaaacattagaaaaaggagttcctttctcgtatgattggtttgaacaaaaaaaacacatacagaaagaagaactccttcatgaatgattttaccaaagattttgctcaagctctattcaatccagacaaaataaatgatttattgcgcaaagaactacaacaggctgttaataacttgctagaagctgaattgactgcctttctgggctatgatccctatgccagaaatggctggaatactggcaactctagaaatggtgcttatttccgcaaagttgatacgcaatttggcccaattgaagtgcaagtgcctcgggatcgcaacggtcaatttcatcagcacacgctgcctgactacaagcagcactcggatatcttggaaagcatgattatcaagctttactccaagggcgtgaccaccagggaaatagccgatctaattgaaaagatgtatggcagccattacagtccagctcaggtatcaaatatttccaagcagatgctccccaaggttgaggcttatcacaagcgcaagctaagcgacaagtttttctgtgtctatttggatgcgacataccttcctttgcgccgagaaacgtttgagcgtgaagcagtatatattgccattggcattaaacctaatggacataaggaagtcattgactactgcattgctcctagtgagaacattgaagtctggacagagatgcttcaaaacatgaagtccagaggcttgaagcaagttgaactctttctttctgatggtgttgttggcatgaaaacagccttggccaggacttatcctaaagctcattttcaacgctgtttggttcatgtcatgcgcaatatctgcgctaaagtacgcgtcgacgatcgtgaaaagatcatgaacgaattcaaacaggtgcatcaacagacaaacaaagaagaagccacagctgtcctgcatgacttctataccaaatggggcaaggtttacagccatgttatcagaagcttgaaagacatagaaccagatctgctggtcttttataactatcccaagcagatcagagcttcaatttattcgactaacatgattgaatcatttaacaatgtgatcaagcgcaaagctaagcctaaggcagagtttccaactgaacagtcgcttgatgcttttattggtattcaggcaatgagctacaatgaccgttatttcaatcgaattcataaaggctttggtcaggttcaggacaccttagaatcctactttgattaaataaataattaaaaaatcaatttacgagaaagaactatttacacaaaagatttgacagtttcaataatgtataaagcaaatatacattaaatataaactaagtatacgtaatgtataaataaaatatgaggtaatgctaatgaaagtatatacatcaagtggcgtatatgagatcaaagaacatcgagtaaaaattcttccaagttattttgaggcacaagtaaataactctaaaaattttgaaattagaaaaaatgatcgtaattatcaggtaggagatttgctattgctggaagagtataatccaacaaccgcaaattacacaggacgagagattcattgcttgatcacatacaagaccacttttaaacaagtaccaggatatgttgttttaggtaccaagaagttaggtacagtgtaggaataattaggaggatttttaaatgagttttaacccaaatcaaggaagaaagtttgcagaagtattgaaagaaacttctagagttagtgaagcgtctagtaaggaagcaccttctaaagaatcaagtaattacattaagagagaaaagagaagaccttacacctttagcttgagaccaagtgcaagaactaaattgacagagattgcaaaagaacatggatatagttcatcttctagtttcttgaatgatgtgattttggaaggaaagttggaaatgaaataagaagattaagcagactatattgatcatttaaatatatgtagcgtatatttaatgatatgtattattgtaaaaagccatcctagaaatcaagactcataggatggctttttattgtagttatgctgagataaagattctaacaataaaactgatttttactactttatcctttactaagtatatccactagtatatacttagtaaaggataagtaatttttggaggttttcttatggagattacattgcaaaaatggggtaattcccaaggtattagactttctaagtcactactcagagatcttggaattactactgaaaaagctacttttgaggtaaaagttaagaataaagaactaattttgaaaagaaaaaaagagagcaagctagcacaacgatttgagggctttgattatgaggcatattgggataaatgggataatgaacatcctggtgaatccaaagaagttgattggggcaagcctgtaggtaaagaaattaaatggtaagaaagtcacctaaaatataaaaaggggggtgaaaaaatgattgatgttcatcaaggtgacattatcattattggttttgatccaagtttaggacatgagcaacaaggaactagacctgctttaattgtatctaatcatgactttactaggttaactagatcacttgtgaaagtagtaccgattagtaaaacagaaaatgattttccgttacatattccagttcctgaaggtttaaaagtccatggagttgcagaagcacaacaggaaacaactttagacttagctgcacggcattggtacaaagtggatcatgcacctgcatcttttataaaagatgttataaatgctatttcagattcttatgaatttgaagaataaaaaagtcactagcgacaaaatctagtgacacaaaaacgaagcctatatactaacctgacaaaatttagtatataggtttttaattttattgtcaaaattatcaggtatccagaaaggtatccaacttcaaaattaattaaaatcaaccaacatcaaaatagcttattttcaatatataaaagcaactaacattaactagaatccaaaatatatcccacccggatcataaattaagcctgtaagcattggtcttacaggctttttacataccttaggtatctatgtgctaaattttactacaaagacaatatttttttacatttgatattgtatgatacaaatatatgacaattattaacttaatcttacattattagtgaatcagttgactaaagtttggaacgagcttattctaaaattgatttccaaaaaataggatcgacaagtgtgaacgacaactatttttaacattatcggaggaattaagattgactacaaccaaaaaaatcattgttagattggcatgcgcgactgttcttggtacggcaggggcagcgctgacacaagtaaatagaccacaaactgcagttgtgaacgctgcaactacctctgttgcagcccgcgcacttggagttgatgttgctagttatcaaaacgctgacttgtcaagtcatgcgcaagctggagcacaatttgcaattgttaaagttagcgaaggtacttcctatcgtaaccctaaggcatcaagtcaaatttcaacggctttatcaaataatatgatgccaatggcatatcactttgctacttttagttcaaatgcaagtgctgctgctgcagaagcaaattatgcaattcaaactgcacaagcatttggactacctaagggctcatatattgcttgtgactatgaaacgggctcaggcaataacatttatggtggtaaaacgccaacggctaatgcaattattgcttttatggacactataaaaaatgcaggctataagccacttctttatgctagttcatcagttttacaaaataatattgatactaatagtgtaattgtcaagtatcctaactcattgtgggtcgcttcatacgctatttcaggtagaattgatagtccaaacttcaattacttcccatcaatgaatggcgtttcaatttggcaatttactgataattggaagggattaagcgttgatggaaatattgctgttttaccattatcaattgacggtaatgtaacttccaacaatggcgcaatttcacaagctccagctaccagcaacaccaattctgctagctcaaccaataaaaccactgcttcatctagtcaaacaacctcatcagatagtaacaaaggtgttgcaactgctggttatgtaatgaagaagtcttacatctacaacaagaagggggaccgccaaggtggctactatgcagcttatactaatattactcattatggtgtagtgactcttgataatggtaagactgccttaaacatgggcaatggtcgttacattatggcaagtaatgttttaggtaattcacgtgtacttaagcacaatgcttatgtatataataacaagggaaaccgcgctaactggagagtgcttagaaaaggtacgccaattaagacctatggttcacggatgcgcgttaatggtaaaagctgttaccgaatcggacgtaacatgtacgttaaggcggctaacttttaattaaaaaattgaatttatcaagaaggaattaagcttaaaggtttaattccttttttcatgccgttttttgtataattaaaagtattcaggaaacgcctgaattaattaactgatagggatgaaataaacttgaaaaaaagatttatagcaataatattgatgctactgactttaacgggttgtactataaaaagtactacgcctaagaaggctaagtcgtcagttaaaacggttaaagtcgataaacagcaatctaaggaaaaacaggctaagtatcaagtgatagaccaagtttggcgaattcaacaagatggcgttgatatttatggtcatatatatctaccacagggtttagctggtaagaagaaagcagtaattttggctcacggattggcaggaaattaccgtgatctaaacagttatgctaaatatttagctagtcgtggctatgttgcctatacttttgattttcctggtggagctaagaatggtcaaagtagtggtgtagatcaattaaagatgtcaatttttacagaagaaaagaatctacagctggtattaaatacaattaaaaataggactgatgttgaccgtaaacaagtgtctttgctaggcgagagtcaaggtggagcagttgccgcaatgctcgcaagtaaatatccgcaagaagtaaagtcattgattttgctttaccctgccttttcgatcactgattatgcgaaagcggcttttaaatcagaaaaacaagtgccagacaagctcaacctatttggcttcacaattggtaaggcctattttgaaaacttgttcaagtataacttgttaaaagaagcaactaagtatcatggtccagttttaataatgcatggtacaagtgacatgattattccagattcttattcaattaaggctaataaaaaatttaagcactcgaaattatacttatttaagggtgcaggtcatgattttaaaggtaaatatcatagtcgagcaaatactttaattgataaatttttgcagaaaaatgggaaataaataatgaagaagaaataccttggtttattggctttattaagcctattgagcgtttttgctatttggggtcaaagcgttagagctgatgttgattatgatattgataatgttagagccatagcaagagttaataaagatggttcactgacaatgcatcgaacaattaagtattcatttgatagtgatgctcgtggcgtttattataagcaaaatctggctgtaaaacagaagttgagcaacattcaggttaaggtcgatggacaaaatataaaggccgcaacaacgggcaaaaataatacgtataaattgcaaaagcagggcaattcttataattttaaggtttatcatcgaattaaggaaaatgataaggttaaagttgagtattcttatctaattcaccgggcaattactaattatcttgatacagctgagctgaactttaaaatagttggtaatggttgggatactgacttagatcatgtgcgtgctgaagtgatttttcctggggcagttaaggggctaaaagcttgggctcatgggccactaagtggttacactcaggttttgccaaaagagggcaaaattattatgactgctgatgatgttgcaggagatagtggtgtcgaagtacatgcgatttttccaactacggtaactagtgctaatcagaatattgttaaagaaaataagaaaagagcatttgaaaaacaagaagcagcattagcaaaagaagctaatcagaagcgtcagcgtaagcagatgcttagtataggattgatgatcatttcagtacttgtcggttttgtggtggtaattagaggcttttttattaaaaaagttggggttaagccaaaaatagagcgcgatttagtacataattatgaaattccagatatatcacctactactgcgcaaattttggatgaagctgataaaccaaatgttaaagcatttgcagcttatttgatgcaattagctggtaaaaataaaattaagatcgaaaaatatcaaactaaacatttaaagcggactaattatcgaattactttagtagatgatagtgttttgactgatgacctgttagactttatttttaacaaagttggtgatggtaagtcatttacaacgaaagatttgcgggattatacttctaaaaaattgggtaggcgttttgataaatggtgtgacgggcaatataagcaagttgaggataaggacttgcttgataaaaaatataaaaagcagcgtagcaacttccgaacggggatgctcatgggaatgattgctagctttgcgatctgggtaattagcttaatgatggcaaataatatacccagttttgtgataataattggaatcatgatgatcgtcttagaagttgttgcattcatagtgggcaattctcgtttaagtatttatacccaaaaaggtgcacttaagacagatcaagttcgcggctttaagaaaatgctagacgatattggtcaattcaagatgaaagacgtcggtgatctgattttatgggaagacattatgccgtatgctgtagcgtttggtctatccaaaaaggtattgaagcagcttaagattgaatttgcagatgaattagatgctgcaccagttctgttttatagtggattctatagtagcagtagtgacagttttgagcatagttttgaacgtagcttctcttcagccgtgtctactggttcatcttcagtttctggaagctcaggtggattttcaggtggatcgtctggcggctttggtggtggcagcggcggtggtgctttttagtgagaaatttttatactataattaaactaaaaaaggagggctaaattatgccatttgtacatattgaattaattaaaggtcgctcagatgagcagattactaacttaatgaaggatgttactgaagcagtgcacaagaatactggtgcgcctaaggaacacattcatgtaattattaacgaattaggtaagcatacttatggccaaggcggcgagtggagagcttaataattaggaattgtagtaaaagacgactcgattgtgagtcgcctttttatatagttaaatagataaacttgtattagagccttaaagctatgtgtgcataaatgaattatttatttagaatcccacgtaatataatgatgttgatgtctagatatttacgaggaggatttgaaatgaatttaaaaaagaaaattgcaatttctgcaactgcactgactgttgctctctctactgcatttccaattgctgctgcgcaaagtcagccggtaaaagcagtaggtattgtattggttcatcgtgttacagcaggtgaaattgctggaggatttgccctagctggagctgcaaagctattgaactttatgcagcgagctgatgaaatggatgctgcacaatataatcgtcgtgcgaataagattaataaaatgcatttgttacgaacaaaccaggtgccgtttttatctataacaaacgtggccaaattttgaataaaaagtcaggttgggttccaatgggcacaatcttgcgtcgaccaaaaggcctttataccattaagggtaaaaagtactattactttggtaaaggattgttcttcccaaagagtgggacagaaccctatagaattcctaaaaagcatataagtacagcaggtgaaaatttcgctaattggttcaattggcttagaactcgataaatagaaaaattaggaagtgtctgggaaaaaactaattctcagacaggaaaaaagaacgatgatttcctaatggatttcatcgttctttttctatactttaagtgccttccttgatattattgaatcaccacaaaacaaaaagaaagaaggcaatcttaatgtatcaaaattataccataggtcaaacagctttaacactcaacttagacttcgctattcctcataatcatttggctaataccattagctggtttgtcgattcaattccagaagatgtcttattgagtaatactgctaaaaccggtcgtccagcttatcatccagcgatgatgcttaaaatcttgctttttgcttattccagaagagtattttcaggcagaaaaatcgaattaatgctggaagaaaacgtgccgatgatggctttggctgaacaccaacagatttcttaccatactatcaataactttagatccagcaagcatgccaatgagctggttaagaaaagcttcctctactttaccaatttgttagaagccgagggccttatcaatgaaggagcgatctttattgatggcactaaaatcgaagctgacgccaatcgctatacttttgtttggcgcaaggcagttgaaaaatttcatggcaagctcaaaggtcaagcggttgagctttatgatgaattgattgccaaagaagtcgtcaaagcaatggcaaaagagaaagtccagaccagtcaaggtttggcagagctagcacaagaaacggaagccgagattgaaaagctgaccgaagaaattgagcaagaacccaaagcaatccctggcggttcgcctagaaaagcaagaagacgcggtcttaaaaagctgcttcataaactaagaaaagactatgttcctcgaatgaagaaatatgaagaggcgaaagaaatctttgcagggcgtaacagctattctaagacagatcatgacgcgactttcatgcatatgaaggaagatcacatgaagaacggccagctcaagccaggctacaatattcaagccgccaccactgatcaatatgtggttgactttgctttataccctaatccaactgatttcagaactttcgaaccatttttaaagcagatgacgacactagacaagtttgacaagattgtcgctgatgctggttatggcagcgaatataattattcaatgttagaagaagagtattcagacaagaagtactatattccttataccatgtacgaaaaggaaaagaccagaaagtatcgcaacgatccaactaagctggctaactggttctatgatgaaaaagatgattattaccttgatcaaaatggcgtcagattcaacttcaaatattatagtcaacgtaaagatcgatcgactggtcaggttcgtgattttaaggtctatgaagcagatgaatttcaactaacgccagaattagaacgcttagccaagactaagagcggacgccaacgtcaggttcgctataatcctaactggcaatacctaaaagaaaaagccaaagcagttctccaaagtcctgaaggcagacacatctacagcatgaggaaatatgatgtggagccgatttttggacatttgaagaacgtctttggcatgcgccgaactcatttaagaggcaaaaagaaggttgaaacagatataggaatagccttcatgatgatgaatttaagcaaatattggaacagaagatggtcaaaagaccaattttctttgttcaaaaataaaaatagacagaaaaagacggtcaagcaactcaaattaagagttggattgatcgtctttcagtatctaagggttagttttttcccagacactttttgcgtaaaaaaatttaatcactaaaacgatcaatcaattaacactacttcataaaaattagtataattatgttcgttactattagtaagttatacaataaaagtggtgagaataatgtatgattatcgaaataatatcaaaataattttaaataaaactgaggctgatgataaaagtctcgaaaatagtttaagtgcgattaaagctatcctaaatatggccgaagataatacagctgaaaaatctgagactaaatcagtaactcaacctaagaataaaattgcaaatacacaatcaattgcacaaagaaatgcagatttaaagcaatttaagcaattattgattgggctgacagccttaattgagaccccaggtgatgaaaaagctaaaaagagttcacttgatgctttacacaagttgacgtttgttccaggcgttggcaagcgctatagcaatgttttgggtaaattggatcaggcaattcaaaaatctaagacaactaaagaagctgttaacaagaaaatttttgaagaagcaatgaagcccaaagagcaacctaagcgcgattatcgtaaaggacgccgctatactgttattcgggctttatcaggctgtaatttgattaatgatagtggtcaaattgtttaccgtattaaagaatcacaaattcactctttgaatttaaagagtggtgacatagttgaagctattgaaaatcgagataatccaaattatgaagcagaagtcttgcgcgtggtgggttatcgcaaattgcgcatgcgtgattatgacccaatcgaagaattccggtatgctgtggtccgcggcaaggccaatcaattagctatcactagaaatattaagggcgaaaagttgcgaattcgcggtaaggatatcacgattccggttgattcaagttattatcaaggtgaaaatattcatgttgaagatggttcaattgtagatctagcttggtatacgggtgatgttcgcattaagaaaaatcctgctgaggcagtacagattcgttggatttatcaagttgatccgcctaagaaatcagatctgtcgtatcaaaagaaaaataagtcaaagaaagaagaaacagaagagttaactaaactcgacatgaatttgcactatcagcgggtgggaattgcgattggtgataatcaaaatgaaggaatattagaagggattgtttcgcgctataatgggatcccaattccaatagatgcttttgaaggcaagaagaaggtaatggaacggcaaatcaaagacttagatattgtaatcttgatgacagcttatgctgctcatgatgctacttggaatattcaggaattcgcttcaaagtatggtgttaaatttgccgtttcttcatctaaaggctaccgttcttttgagcgagcattatatcgagctgaaaatgggttacctgcttatgaaggaacgcaatcaatcgattataaagaagttaaaaataaataatttgttaatattattttgtttgcttgagctaacagatgatttttcgttaaaatagtactaactaaaagaaaggacgcttaataatgaaaaacattaaacaacgttcctggatgagatggttggtattcttagcaggacttgaaataatcgcaatatcaatcaatcttttttatggaccgattaatattgcagctggtggctcaacgggtatttctattctagtcgatgcagtatggggaattaatcgatcaattacagtgtttgtagtgaatggcttgatgctgattttggcggcaatctttttaggcaaaaagactacccaaaatattgcattaggtagtttgctcttaccagttttgatggaagttacgcctagctttaaagcagtgaataatgacctactagccgtaatttatggtggtgcattaatgggacttggagtttcgctactttatcgcgttaatgcctcaagtggtgggacaacaattccgccgatgattctgaagaaatatttttatttaaatcctgcaactacacttttatgcattgatatggtaattattttcttgaacatttttgtcgatggttggaatgctttcttcttagcagcattttctcaagtggtaactgccattacgatgcgctatgcggagaccggttttgataaaaagtatcaagtcagaattatgagtaattcagatttagaccgaattcaagatatgcttaaagaagattatcaaggcctgacgatttatgatgttataggtggatatagcgacgaaagcaagcgtcaattattaatcgtagttgatccacgtgaatatgggccacttatttctaaagtacatgagatcgatcaggatgcgtttatcattaccgaaaatgttgcaaaagtgcatggcggtcaatggcgaatgtaaaaaaataattgatcttagtctaaaagcgttgtatgatataagagttgtatttgtggagacctccacatctgcaaccgcacggcttgaggttagaagtcttcttatgtaagaagcaccccagttcggcgagtctaagtatttttttcggaggtgtacaaatgtacgcaattattaagaccggtggtaagcaatacaaagttgcagaaggcgatagcgtatttgtagaaaagcttgatgctgaagaaggtagctcagtaacttttgacgaagttatccttgttgctaatggcgacgacgttaaggttggtactccattagtagatggtgctaaggtaactgctaaagttgaaaagcaaggcaaggaaaagaaagttgtaacttttaagtacaagcctaagaagcactcacacagcaagtatggtcaccgtcaaccttacactaaggttacagttgaaaagattgaagcttaattcagaggtgaaatgaatatgaacattttaggtatgaaattatacgctcaccacaagggtggtggttctactgccaacggtcgtaactcagctggtcgtcgtttaggcgccaaggctggtgacggtcaaactatccacgcaggtactattatttaccgtcaacgtggtactaagattcacccaggcaagaacgtaggtcaaggtggagacgacactttatttgcacttgttaacggcgttgttaaatttgaacgtcttggcaagtacaagaagcaagtttctgtatacccagctgaagaagctaagtaattcagagattaacatgaaaaggcgagtagcataagccacccgtctttttttatggctttttccgcccagaaacatgtataattaaaccaatatcatacaaaaagagggtctctgagatggaaaataggcaagaattattatccttaattaaccagcgaattgagcatgtaactgatttaattaaagaagcaaatgcagatgcattgattatttttaatcaagctaattatcgatatctaaccaattttacaggggaagaagcacaattaattttgactgctagtggcgaacgggtacttttatcagattctcgttttgctggacagattaaagcacaagcacctggcgaaatggatgttgtaatgaaacattctagtgattatgaagaacttactaaggccttgaaaaaaatggacgtcaagagggtcttagttgaaggtgaattcgtttcagcgagtgaatatgaaaaacttaagcaactaaatccagaacttgaatttgtgatggtcgaagaattggttgaacgagtacgtaatattaaagatgatcttgaaattgcggcattgcgcaaagcaattgatatttcaatggaaagctttaaaggtattttgccgatgattaagccgggcgttaaagaacgtgcaattggtgctaaattggactacctatttaaagttaatggcggcgatggccctgatttcgatacaattgtagcttccggtgtgcgttcggcttgggctcatggcgttgctagtgacaaagaattatccgaaggcgatatgattgtcattgactttggtagtttttatcacggttatgcggcagatattactagaactgtttcattaggtgaagttgatgctgaaatgcataaaatctatgatattgtacatgaagcacaacgccgtggcattgccgcggcagttgcaggtaatactggatatgatgttgataaagcagcacgtgattatattacagaacaaggttacggtcagtattttggacacgggatcggtcacggcattggtcttgaaattcacgaattgtgtcaaccagctttaccttttagaactactaaattggtcaataatatggttcatactgtagaaccaggaatctacttgccagacaagggcggtgttagaatcgaagacgatattttggtccatgatcaaacgcctgaaactttatccactttgccaaaggatgaattgatttccctataatagctatttaatttatcgtatttatggtaaaaacgcttcaagattggtaagataataattgtagaaatgagggacttaatatgacaatgatttcagtaaacgaattcaagaatggcttgactattcaatacaacaacgatttatggcgcattgttgaattccaacacgtaaaaccaggtaagggtagtgcctttgtacgttcaaagcttaagagtttgagaactggtgctgtacaagaatatactttccgttcaactgctaaggttgaaactgcagacattcaaactaagtcaatgcaatacttgtacaatgatggctcaagttatgtattcatggatacttctacttacgatcaattagcaattccaaatgaacaaattggcgatgaagctaattacttattggaaaacatgattgttaacgtagttatgcacgaaggtgaaactttaggtatccaattgcctaatacggttgatttgaaggttgctaagactgaacctaacatcaagggtgatacttcatcaggtggtggtaagccagctactatggaaactggtttagtagttaacgtaccattcttcattaacgaaggtgacgttttaactattaacactgctgatggtacttacgtatcacgtgcaaataagtagtttatttgaggtaacaaaatggcagatagttcaaaaattcttttaagtggtgaagaaaacagcgagcaaattaaaattgatccaagtgttctagaagttattttgggtattgctgcagaaaaagttgatggtgttgccggaatgcgcggcagtttgaaatcaggcttaaactgggttttcggtcgtgaagatcatggtaagggcgtaaatattagtgttgatgacgataataagctaattgctgatatttatgtttatcttgaaagcggcgttaacgttcctaaggttgcaatgacgttgcaaaagaagttgaaggcacaattattgcaaatgactgatcttgagctgaaggcaatcaacgttcatgttgtcggtttagttttcccagaagatgaaaatactgaccagactacatcagagctgtttccggaggacgaagaagaaaaataatgaatcaacacgaaagtcgaaaagttgctatgcaagccgtttatttggctaatcaggagccagatttaactgccgaagaagttgaagcaaaagtcgttgcaacgcttaatttaaaacagctttctgcctattctaagaagttaatcgaaggcgtactagaagatcgcaaaaatttacagtctgaactaactagtcatttgaaaaagggctggcgtcttgagcgtgtaagtcaaactgtggtagctatcatggaagtcgctttgtttgaaatcaatcatagtgatgagattgatgctaaggcagcagttaacgaagctttaaatttatgtgacgaatttgctgagcctaaagagaaaccatttattaatgggatgttagcaaactttgttaaatagcgatgaatagccggaagttttgccggttatttttttataaaggagacaaaattaatgggagaaattcttgatggtaaagtatttgcaaatgaattgggacaaaatcttaaagaaaaggttaagaatttaaaagaaaaaggaataacgccacatttttgcgtaataaatattggggatgatcctgctagcaagatctatgtccgtactaaaaaacggcgtgctaaaaaaatgggcatcattcaagatatttatcaaatgcctgctgatactgagcaagcagaagcattggctttgattgataaattaaatgccgatccaacgattaatggagtaatggtacagttaccagctccaaagcaaattgatgcagatgagttactagagagaatagatcctaataaagatgttgatgggttaacgccagctaacattggtcgtttgtggatggaagatcattttattgaaccagctacagctgagggaattattgctctattaaagcactatcaaattaagcttgatggcaaaaatgttgtggttgttgggcgcagtaatattgtaggtaaaccacttgcagctctaatgcttgagcaaaatgcaactgttactatttgtcacttacatactcagaatttaggggaaatcacaaaaaaagctgatatagttgtatctgctactggacaagcatttttgatcactgctgatatggttaaagatggagcagttgttgttgatgtgggcatgaatcatgttaatggtaaattagttggtgatgttgattttgacaatgtaaaagaaaaggctagctacattactcccgttcctggtggggtaggcccacttacagtacaatttttaatggaagcagtagttaaattgactaggagacaaaatggccgagaataaatatttaacggttactgatttaaattattatattacgcaaaaatttaagaatgacccatatttgcacaaagtcttcttacaaggcgagctatctaattttcgctatcgccgtaattcgcaccagtatttttcgttaaaagatgaaaaatcgaagattaatgtagtaatgttccgttcgttctttgaaaaggtgaaatttaagccagaagagggaatgaaagtctatgtggttggctatgttagcgtttatggaccacagggctcgtatcagttttatgctgagcagatggaaccagcaggtcttggagcattatatgagcaattgaagcaattacaagccaaattagctaaagaaggattatttgatcctgctcataaaaagccattaccccattttcctgatcgaattgcagtagttactagtgcttctggggccgttattcatgacatcatggttactgctaatcggcgattcccacatgcagaaattgacctgtatcctgcacaagtacaaggtgatactgcggcagattctttgataagggcgatgcagcaaattgcagcacaaggtgacaagtatgacgtaatgattattggccgtggtggtggttcactagaagatttgtggccatttaatgaggaaaaagttgtgcgtcaagtctatgctatgccaatgccggtaatttcttcggtaggtcatgaaacagacactactttatgtgatttggttgccgacgcacgtgcagcgactccgactgcggctgctgaatatgctacgccaaatacgctggatgaacttgctcatattaagcaattaactagtcaattagttgctagtatgcaaaatattattcggtcaaagcgtgatcgtttaagccgggtgcaaaattctgttatcatgcgagaaccaactaggttatatgaccaacaaattcagcaggttgatcaattaaaacaacgtttgcaaaatagtatgcaaaatcgcgtaacgcattctgcacaaagttatcaattattaaaacagcgtttatttagtgtcagtcctgataaaaaaattaatcagctgcagcagcaaaaacaatttttgcagcagcggatgattgataatatgcagcattatttaaagaataagcgcaatgtttttactcaagtaatgcaacagttagatgattacagtcccttgaagacattagagcgtggctttgtttattcaactaatgagcatggtgaaacaatcagttccgttaaacaagtgcaaaaggatgatcgtttgttattgcattttaaagatggacaagttgatgcggtagttacaaagataaaggaagaacaaaatggcagtaaagaaaaataattttgaagaacagttaactagtttggaacaaattgtacaaaatttggaaaatggtaatgtccctttggaagatgccttgaaggaatttcaagaaggcgtgaagattagtcgtgatttggaaaagaaactcaatagtgcagaagaaactgtagctaagttaattgatagcgatgggacagaacacaagctggatccaaataatgcatcagcaccagaggaataattatgacagcattcacttattttaaagatcaatggacaccaataattgatgattatttagctaagcatttggctagtgaagtgaaagatcagaaaattagccagattatggcttattcagtgatggctggtggcaaacgcttgcgtccattattgtttttagcaacacttaacacattaggtaaaaaaattgaggaacctgaagttcgaattgcctgtggaattgaattgattcacacttattcactgattcatgatgatttgcctgctatggataacgatgattaccgtcgtggcaagttgaccagtcataaaaaatggggtgaagccgaggctattttggccggggatgcgctcttgccaatgggaattcaatggattgctgaaggtagtaattcagctcaattggtagaattaattactaaggcagtgggtccaaacggaatggttggtggacaatatttggatattgattcaaccaataatgctagtgtttctggagacgctaagttcattaacaagatggaatggctaaaaacaggatgcttaattcaagctagtgtcgaaatggctgctatttttgcaaaagctagtgacattgaaaaagtaaaattgattgactttgctaaagtttttggccgatcataccaaatttatgatgacttggttgatgtggttgagactagcgaagaagctggtaaagctacgcacaaggatgaagctgaaggaaagaataatactttaactttgttaggaattgatcaaagtcgcaaagaactaactgacttaattaagcaagcacaagatgatttgcatggactaaatggcgaagtgctaactggctttttagatctttatcaaaaggtgttataaatgacaaaacaaagagcagatattttattagcagaacaaggcctttttcactcccgctcagctgcacaaagagcgattatggcagggctagtttctgatcataatcatcaacgcattgacaaaagtggaactaagtttcctgaaggcgagaagttctatgttaaagatgatggcaaaaagtatgtttcccgtggtggctttaaactggaaaaagcattgaaggtttttaacattgatttgacagataaaatttgtttggatattggtgcatcaaccggtggatttaccgatgttgctttgcaaaatggtgctaagatggtttacgctttggatgttggttataatcagttagcttggcagttgcgggacgatccacgtgtggttgtgatggaaaagcaaaatttccgctattctaaaccagaagattttgaccaaggtttgccagattttgccatgactgatgtatcctttatttcgttggacttgattatgccaccaatgtatgcaattttgaaggatcaatgtgatgcggtttgtttgattaagccacagtttgaagctggtcctgaaaatgtaggcaagcacggtattgttcatgaccatgaagtacataaagcggtaatcgagcatacaatgcgtaaggcattagagacaggctttaatgtcctaggcgttgattattcaccaattaaaggtggcaaaggaaacattgaatttttgatctatttgcaaaaagatgaagcaaatggtggacgcaacttatggcaaggcagtccagctgaagtggttgaacgtgccataagtggcctataggagtgaaattatgctagttgagctggatatcaaaaactttgcaattataaaaagcttaaaagttcgttttcaagaaaaaatgacggtgatcatcggtgaaactggtgcgggtaagtcaattattattgatgcggtttcactattaatgggtggtcgtggtcaaaaagaaatgattcgttcaggtgagcccaagtcaattattaccggcttgtttgaattggataatcaaaaagagaaaattgcggaattatgtgatcaatatggattgccccatgatgatgatcaattagtaattagtcgtgaattagcagtaaaaggcagaaatgtagttcgcattaatggtcaactaactacaattaatgttttacgcgaaataggtaactatttagtcgatattcacggccagcatgatcagcaaattttaatggaccaagatcgtcagattgatttggtggataactatgccccagattcttttaagacggatttaacaacttatcagaaagattttactgaatggcaaaagttgactagtcaattgcgacatttgcgtcaagatgctcaagaattggcacaaaaacaggatattttgcaatttcaaaataatgaacttgaagcagctgatctagaggatccacaagaggatgaaaagcttgaggaagaatataacgaactaaataattatcaaaaaattgcggatacggcgaattacttcatgcaattgtatgatgacgatgagcatggaattgcaactttacttggagatgcgcaaaatgctgcgactgatttaactgaatttggttcaaaatttaaggattttgctaagacagttgatgatggagtttatgctttaaatgacgcccgcagtgaattatcgaacttaatggatgcaatggacttcgatgaggaacgttttcaatacgtgactaaccgcttggataccttgaattcattgaaaaagaagtatggcccaaccttggctgatgtgtttgctttttatcaaaaagtacaaaaagaactcagtcaatttgaaacaggcggccttgatgaggaaaaattgcaagcagaagttgccaagattgaagaaagaatgacccaagaagctagagatctgcatttaatacgcgaaaaagtggctcattctctggaagagcagattaagcaagagttagctgatctctacatggaaaaagctcgcttttctattaattttgatgaaacaaagacatttaccgataagggaactgatgcgattgttttcttaattgcacctaatccaggtgaagatttaatgccattagttaaaattgtttctggtggtgaacaatcaagattgatcttagctttgaaggcaatcttcagccgagttgaaccagtgggtaccatgatttttgacgaaattgatacgggagtttctggccgagtatcggctgctatcgggaaaaagatgcactcaatcggtcgcaacaagcaggtaattgcaattacgcactcaccacaagtggctgccgcgggtgatcaacgctacttggtagctaagcaagtaaaagatggttcaacctttactcaaataggcccacttagcaaggaagaaaccattacagcgattgcacagatgatggctggacaagatgtaaccgatgcagcaaagaagaatgctgcagatttgattaagagtattaaagatgactagtattagtaaattttggcgtgatttttgtgtagaacatcaagtaagtcctacagcattagaaggtgcttttgcttttggagctaatagccgggatgcagatattcttagtgatttggtcaaaagtggaattaagacggcaacgactagcctgtattctgcgcaagaagatgtaccggttgtagggatgtacgcaattgttttaaatggacgaaatgaaccagtttgtgtgattcaaaataagactgttgagattatgccatttaaaaatgtctcagctgagcatgcctatttagaaggcgagggcgatcgctcatatgaatcttggcgtaaagtacacgagaaattttttgcgcgcgaatgtcaagaactgggacgagagttcacagatgaaactgaagtagtgtgtgagacattcgagaaaataatttagtaaaggagcagacgattttgtctgtttttttgtatgcaaagagaaaacttgaaaaagaaacaattttagtgcaaactagatatattacaagttaagaggagttcagcatggcagataaaggtttattacttgtgctttctggtccttccggcgttggtaaaggaactgttaaaagcgcgattgttgaaaacaaagtctttccatttgaatattcagtttcaatgactacgcgtcaaccgcgaccaggtgaggttaatggccaagattatttttttgttagtgaagatcgctttcaagaggctattaaaaatggtgagttgttagaatataataaatatgtcggtcactattatggtacacctcttgcaccagtgaagaagatgcttcatgatggcaaagatgttttacttgagattgatgttaatggggcacaaaaagtacgtgaaaagatgcccgatggcgtgtttatctttttaaccccaccagatctacatacgttacatttgcgtttggaacaccgtggcaccgagtcagaagatgtaattcgtggtcgaattaagcaagcgcgcaatgaaattttggagatggaagactatgattatgcagtagttaatgatacagtagctaatgcagttgatcatattaaagcgatcgtcgatgcagaacatgtcagtgttaaacgtgtaattgatgactatcgtaagatggtcaaggaggattaattattatgagaattacttacccatcaattgataaattattgtcacgtgttgattcacgctattcattatctgttcttgccgctaagagagcacatgaacttgaagctggtgatccaccaactttggaacattttaagtgtgataaggctgttggtaaggcacttgaagaaattgctgctggtaaagttactgttgacccagctcatgccgaggttaacctcgaagattaatttattgaccttcatcctttggggtgaaggtcttttttacaggtgattaaatgattgctcaggttattgttgatgtagctgcacggcaaacagaccgtatttttgaatatcatattccaacagaattagaaaaggatattgcgattggatcaagagtagttgttccgtttggtcctcgtaaagtgcaaggttttgtggtggggatcactgatcaaagtgaatttaaaggtaaacttaaggatttgctagttgtggtagatgagatgccaccgcttacgccagagttggtaaagttatctgctgatttagcaaaaaatattttttcttaccgaattaaaattttacaagcgatgctaccttgggtaatgcgagcaaattatcgcaaattgctagtgccagctaatgatagagctgccaaaatgccgctgtttcagggtgatccaattgatttaaataaaattacggatctggcggagattaagcaattccgcaaattattgcaagatgatcaagcaaagattgagtatgtggtagaaaatcgagccaagaagaaaaaagaaaatcaatatgaactagcattaaaaaaagaggaatatcccaaaatttacaatactttacgtcaaaatgcggtaaagcaaaaaaagttattgatggatatcattgataatgcagcggattatcccaaaagccaaagccagctagaaaaacagcttggattgacggcggcgagtttgaattctgcgattaccaaaggttggttgaataaaaaaagtgttgaggtttatcgcgatccgttatccggatttgatgacggagaacataaaacagcggttaccttaaatggtgagcagcaaggtgctttgaaccagatcacccaagcaattgaacagcgccaggctgagacttttttgttggaagggattactggtagcgggaagactgaagtgtatttacacgctattagcaaggctcttaaacaggggcgaaatgcattaatgctggtgccagaaatttccttgacgccgcaaatggttcgtcaggttaaggcacgttttggtcaagaggtagccgttttacatagtgccctatctgagggagaaaaatatgatgagtggcgccgaattcgtcgtggcgagactaaggtggtcgttggcgctcggagtgcagtttttgctccactagataatattggtttaatcgtgatcgatgaggaacatgagtcttcatataagcaagaaaccgatccacgttataatgcacgtgatgtggctatttggcgtagtaaatttcataattgtccgttggttttaggaagtgcaacaccatcgttgagtagccgtgcacgcgcccaaaaaaatgtctatcatcttttacggttaactgaaagggctaatcaaaagaaattgcctaaagttaatttgattgatctaaagcacgtgcagtttgctggtggtcaatttgatttatctgttgagctagtagatgcaataaaaaagcgtttggcaaaaaaagagcaggttattttaatgctcaatcgacgtggttttgctaattttatgctttgccgtgaatgtggttttgtattaaaatgtcctaattgtgatgtttctttaaatttgcataaggatactaacagtatgcaatgtcactattgtggtcatactgagccagtacccacacgttgtcctaattgccaaagctcgcaaattcgttttttaggtgcaggtacacagaaggtacaagaagaattagaagagcttctgcctggtgcacgaatcttgcggatggacgttgatacaactagaagaaagggtagctataagaaaattctagatgcctttggtgctcatgaagctgatattttgttaggtacgcaaatgattgctaaaggattagatttccctaatgtaactttagttggagtaatcaatgccgatacaggattatggctttctgactataatgcttctgaaaagacttttgaattattaactcaagtagctggccgtgcaggtcgtgctgataaggaaggggaagtcttaattcaaacttataatccagagcattatgctattcaactagctcaaactcaggactacgaacgattttatggctatgagatgaatatgcggcatgctggtaactatccaccatatttttataccgtgctgatttccattgctgctaaaaaagaacagaatgcagctcgtgaggcttttaggattaagaggtatttgaatgagcacttgcatgtgccaacgattattttgggaccaacgccaagtgcaatttctcgtgtaaaaaataaatattattatcaaatactggtaaaatataaaaaagaaccaaatttaaatgaattattacaccatgttcaagattccgcgcaggaagctaagaaatatggtttaagtatttttattgataatgaaccagagagaattatgtaaggggatgctttaatgacatcaataatatttatgggaacaccgaaattttcagttccagtacttgaagggttaattgatgaaggctatgagattaaagccgtggtcactcaacctgataaaaaggtaggacgtaagcagaaaattactaagtcaccagccaagatcgcagcagaaaagcatgatttgccaatctttcaaccggttaagttgtctggatcagacgaaatgcagaaattaattgatatgcatgcagatttgattgtaactgcagcatatgggcaatttttaccaactaagtttttgaattcggttaaaattgcggcagttaatgttcacggctcacttttgcctaaataccgtggcggtgcaccaattcaatattcactaattaacggtgataaagaaactggaattaccattatggaaatggttaagaagatggatgctggtgatatttatgctcaagaagcaattaagattgagcctgatgataacgctggcactttatttagtaaattatcaattgttgggcgggacttattgcttaagactttaccagcaattattgatggctcaattaaaaaggttccacaggatccagaaaaggtcgtcttttcacctaacatcactaaagaacaagaaaagcttaatgttgatatgacagcagaagaggtcaacgatatgattcgtgctttgaatccagatcctggtgcttatttgatgattgaaggcaaacgtttcaagatctggaaggcagaaattgcatctgattcatcaagtttaaatgccggctctgttgttgctaacaaaggacgttttgccattagttttgctgataattcagtacttaacttacttgaagttcaaccaagtggcaaaaagagaatggacatcaagagctttttaaatggtcaaggtagtaagtttgtcccaggtgaagaaattgtcgatcgataagagtgcacgtgcagtcagcttagagacattgatcaaggtcttagatcaaggctcctattctaatattagtttgaataacagcttaaagcactctaacttgtcaattgcagaccaaaatttagctactaatattgtttatggcacgattcagtatcgattgtttttagaatatcagttaaaaggcttagttaggacaaaactgaccgaaaaatatattaagccattattgttaatgtcactttaccagttgatttttttggataaagtgcctgatcgtgctgtacttgatgaggctaataaacttgctaagcaatatggcaagcgacattcagctggctttcggttggtaaatgggattttgcgttcgtttactaggcgcggggtgattttaccagctgaaaataatccagttaaatatttaagtgtcaaagagagcgtacctgaatggttagttcaatatttaattgataactggggcctagacaaggcaaaatcagttttaaacagtattaatgagccagctaaaaacagtgtacgtatttcaaagttggcagataaagagcaagtttttgcccagttagagcgggataactatcaaccacaatggtctaagttatcaagtgatgatgtgattttgagtcacggtggcattagcgaaagtgatttgtttgaagaaggcaagttaacaattcaagatgaagctgccagtttagtcgtagaagcttttgactttgaacaagatgagcatgtgcttgatgcttgttctgctcccggtgggaaaaccgtgcaaattgccgaaagcattgttaatggtgatgtgactgccttagatattcatgataaaaaattacgtttagtacgagataatgcccagagaatgcacgttgcaaataaggtaaagactaaggcatgtgatgcacgtaaggctacagagatttttgcggcaggtgaatttacaaaaattttagtcgatgccccttgttctgggcttggattattgcgtcgtaagcctgaaattcgctatactaagagacaacaggacttacaaaatttacaaaaaattcaattggcaatcttaactgcagtaagttcactcttaaaaaagaatggcgagttggtttattcaacttgctcaatttcaatggaagaaaatgaagaggtagttaagaagtttttgcaagcacatcctgactttgaactagttccatttaagttaactaaacttgaatcaaagacagggatgttgaaaataatgcctgatctagatggcaatgatggatttttcattgctaaatttaagttacgaggttagatttttgattgaaacagcatacgcttcgagtattggtaaggtacggaaaagcaatcaagattttgtaaaagtttttaaaaatcaaaagggaattgtcttagcaattgtctgtgatggtatgggcggccatcaaggtggtgacgttgcttcaacaatggcagtcacccatttaggacataattttagtatgactgactttgcagatgctaatcttgctcataaatggcttgatgtgcaattaaattctgaaaatgaaacaattttaaagactgctgataagtttcctgacttaaatggaatggggacaacgattgtattggcgtttgcatttgataaaaatgccttaattgctcatttaggtgattctcgggcttatagttattctgaaggtaaatttgtccaattaactgaagatcattctttggttaacgaattagttaagatgggtcagattactaaagaacaagctaaacaccatccccagaaaaatattattacgcaagcattaggcgtctcaagtacgattgatcctgaatttgatgagatcaagatggggggaaacgacattattttgctctgtactgatggcctaaccaattcacttagcgatccacaaatccaacaaattttggcaactaaggagcttagcttaagagaacgttgtaataaattgattagtgaggccaatcgattaggtggtggtgataatattactgtctgcttaatttggaacaaggaggacgagagcagtgatcgataaaggttatctgcttggggaacgttaccgcatcatcgataccttaggtgaaggcggaatggccaatgtctatctagcggaagatattatcctgcaacgtaaggtggcagttaaaattttacgccttgatttgcagaatgaaccgcaaacccaagctcgttttcaaagagaggcattagctacaagtgaattaagtcatcctaatattgtttctgtacttgatgtaggtaccgatcatggtttgccatacatggtaatggagtatgttgatggtcctaatctaaaagaatatattcaaaaaaattcacctttggatttaaatgaaattattcgaattatggatcagatattgagtgcagttgcattagctcataagcacaatgttattcatcgtgatctaaaaccacagaatattttgatggataagcgcggcaatattaaaatagctgatttcggaattgccgttgctttgaatcaaagctcgattacacaaactaattcagtaatgggttcagttcattatatgtctcctgagcaaacgcgtggcggaatggttactaaacaatctgacatctattccttgggaataattttatatgaattgatcacaggaactgttccgtttaacggtgatacaccagtggcaattgcactgaagcatgcgcaagaaccaattccttcaattcgcaagaaagattcaagtgtaccacaagcgctggaaaatgttgttttaaaggcaaccgcgaaagatccacgagatagatatgctacagctcaggaaatgaaagcagatttggatagtagcttggatcctgaacgggcagatgaaccggtttttgtaccatatcatggtaataacgatgataaaacaattgtattgcccggatttaagccacaaaaggaagaaaaagaagtggtggagccagcaaaaaccgaatcagtagaatcaagcaagccagtaaagaaaaagacttttttacagaatgtcaaaagtcacaaatggtggtggctgatctcaattattgccgcgggtttaatcatttttatgatgattttcgctttaagtggtactggaaataaacgacaggatgttaatattcctgatgtaactaatattgcagaaaaagcagctgagagtaaacttgaagcagcaggcttacaggttggaaaaattattaggcgacaatcagatgatataaaaaaaggccgggttattgcgacaaaaccaactgcaggtaatagtctagagcgaggaaagagcgttgatttaattgtttccagcggttctagcatggttaaagttcctgatatggttgggaagaactatgccgaagcggcagaaaaattagaaaatatgggctttgatgtagttagagaggaccaatattctaataaagttgacgaaaatcaagttatttctcaaagcattgctgcaggtgtagaggttaagccgacgcagactacaattacgttgatagtttcacgtggcaagcaggctagatcacattcaaatatggttaccttgaaagacttaagtaattattctttgaagagtgctcaagactatgccaaagaacatggcctgactttacaaatcaatcaagaatattctgatgatgttgagaagggcttaataatttcgatggagccaggtccgggtactaaggttgagcgtggttcaactgttaccatcaaggtctcgaaaggtccaaaggaagacaaggaaactactgtaactaagacctttaccgttaactatgttggtgatgatctttctaagagtgagaagcctgataatgataaaggaagcaataactctgagtcagaatccgttaatggcaagggtgatcatgtccagatctatattaaggatgatgatcattccttgaacaatatttatcgtgacttgtatattaagcatgatatgagtttctcgattccatttaacattagagaaggtagtggacaattaaaggttgttcgcaatggcgatacagttttgaatgaaaaggtgactaaataaatgaaactagcgcaaggaaccgtcgttggtttgattgctggttattatgatgtagaaaccgctgcgggtatcgtgagaacgcgtgctcgcggcgtttttcgtcaaaaaaagcaaaaaccggcagttggcgatcatgtggaaattcagatagatgataaaggaatgagctatctggtgaaaattttgccgcggattaatcgaattgggcgaccagcagttgctaatgtaagtcatgttttgttagtaatttctgcagtagaaccggatttttctgtagagctgttagatcgttttttgactttcttttcttggcaaaaagttggtgtaacaatttacttgtctaaagcagatttgctatcagaagcaaagttaaacacaatcaagcaagctttagcatattatcaaaaaataggttatcttgttttcactgattatcatgaaatgcaaattcagattcctaaaatgatcgaaaaaaatcaaatttggactttagcaggacagtcaggtgctggtaagtcaactttgcttaaccatttaaaaaaagatgctaatcaagcgactggtgcgatatcaactagcttgaatcgtgggaaacatactactagaaaggtcgaactttttaagttaggcgcgggctttttagcagatacgccaggtttttcgtcaattgatttgacaccaatcaagttgaatgagttatgtaattactttgttgagtttaaaaaggcaagtattcactgtaagttccgcggatgtcagcatttgcaggagccaggctgtgaagtaaagaagttacttgaagccggagaaattctggaaagtagatatgaagattatttggctatgcggactgagattagcgaaggtcgcataccggaatatttaaaatagaggtaatagctgatgatgattgcaccctcaattttgaacgcaaataatattgatcttaaaaatgatattgaaaatgcagtccaggccggaattagccgttttcatattgatattatggatggacattttgtgcctaatttatcttttggaccgcaactaatcaaagatttcaagcgtgaatttccgatgacagatgctgaaattcacttaatgagtgatgccccagataagttggtaccagcttttgttagtgcaggagcagatttggtcgaactacactatgaagcaatggacaagcctaagttatattattggttcgattatttagcttctaatggcgttgatgctgctttggcaattagtccagatacaccagttgaagtggttgaaccgtatttgccattactgaaacaagtattagtaatgacggtcaagccgggatttggtggacagagttttcttcctgaatcagttagtcgaattaagtcagttagagagattgtcggctctgattttgatattgaggtcgacggcggtattaatgatcagactattaaattagctgaaaatgctggcgctaatatatttgttgttggttcatacttgtatgaaaatggtgatgttggcagtcaagtacataaattagaaaagattattaagtaatgaaagcatatgcattgttgggcggtccaactgaattgtggcctgaagatattgaagaaaagctggctcaagctgatttagttattggggttgatcgtggtgccttgtttttagaagaactgggaataatacctgatgtggcagtaggtgactttgattctttacacgaaaatgacttaagccaaatagaaagtaatgttcaagacattcgctattctaatcctgtcaaggattggactgattctgagctaatgttgcagattgcttttgaagattatcatgtggatgaattagtgatttttggtgctacaggtggaagattggatcattttttgatcaatctattaatgttgctaaatcctgaaatgagattatatgcgaaaaaagtaacgttgattgaccaacaaaatctaatttgcttttttaatgcaggcacgcatgttgttcaaaaaagaaaaaattattcttatattggttttgcagctttaacagcaatcaaagattttaatattattggtgcaagatatgagttgaagcactattctgggaactatcctcgtgttttttcatcaaatgaatttttgcctaatagtaatgaattcaggattagcttgcaaaatggtatgattgcagcaatttattctaaagatattaatcgttttcatgatttataggttaaaacagaactatagaaaagaaacaagggaattcaaatgaaatatattgactttgaaaaagatattgctggtttcgaaaacggtcgctacgaagcaagacttgaccgtgcaaaataaaatgtagaagactacatgcataagaaccacgttcacatttttgataaaaagaagaaggaagtagctactatcaatggcttagttagaaatgtaacttatcaagatttgggcttgccaactaagttgggtgaaatgattactgagtatgcatacacgccaattgatgaaagaatggccgacgaaattcctgatgacgataagcatcacaatattatgaagtaaagtaaaacggtaagaagacaaaataaaatggtcttcttacctttttttatataaatcattaaaataagtaaaaaaataagcttgcaagatcagtgatctaacaagctcttggtctattaggcacgagtaactttaccagactttaaagccttggttgaattaaaatataggtttttagaaatatttataagctttaaatcgttgatattataggatttaatgttttgcaatatcatagaatttttcacggtgttgcacaaatgttgcacaaacttgattgagtgaattaataattttggcatcttgttgatccttatattcatcaagtaagtgagcatagattgataaagtgattgctatattagcatgtcctaagcgtttactgatagcagctatatcaattccttgagaaattaagtatgaaacatgggtatgccttaaactatggaagtgaaaatcaggtttgttaagtccaatttccttaatggcttttcttaagaattgatttacagcagaactagaaggtggtaatccagttctaggaatagcaaaaataaattcagaattattaatttttaattgtttcaatttatctaataagaaagaattaactttaatctttcgaactgaactttcggttttagttggtcctagtatttttaaattaggattccaggttttattaatatcaataattttattcttaaaatcaatatcagtccattttaaagctgttagttctccaagtcgtgcgcctgtaaataaccccgctagaactaaatatttgctagtataacgaggagttaaatttgttaagcataattgtaccagcttattcatttctccttcattaaggtattctatggctctgacattgtcttgatttcctgtgatggttgtgcgattggtaaaattcttaacgattaaaccatcctctattgcatttcctgcacaagctttaaccataatattggttttacgaactgtagcaggagcatggtttttaccaagccaatttaagaagctttgatatttagctcttgaaatatcttttatttttgttgatccaaaatatttttcaagataatgataattggtaatatatctcttttgcgttgattttctgataatcgggaatttaaaagtaagataccagtgttcaaaatagtcagcgaacacagggttcttaactacatctacaccatcaatagaagcggcttccattttaattccgtactgttgtgcttcagacttggttttgaaaccgccttttgatttttgttttaaaatagaaacattcttttgtttttctggatcccattgagtttctctctttgaaaatcttacataccaggttttgccacgttttcttattgatgccattttatttttactcctatttttgctaaaatagggtagacgaaataagccgattccagtcggtttatcgttactctattacattataagtattattaagtttattgagttgcgctcacttactgttccagcagtaggtgggcttttttgttttatagattaattccacttatagttatcataaacatcaaatgtggaacgtcccatttcattattgtcatcgtcaaatatttgtgcccataaacgattgccaactttagacttactaattaagccataatgataagcatcccatgtagcttctttgttaataccacgcatgcaagtagtcttatccttgtcagataaattaacaaaacgatcattaacttccacagataagttagctttggaattaacagtaactttgcttacatattttgaccaattagtatctggatcatttttagaacggaaagccttaatgtttttaacaattaaagcattagtttggttagctttctgctttttaattgcattgctttttttagccttttgactttcaattctttcttgtctctcaatatttgcggtgctttgctcattagaatgtcttatccataagaaccctcccactaaaaccgcaattattataataaatcctattgcacaaccaacagaaccatctttattgtcttcttttttatcagtcatttgttttggctccttatttctttcaggtttaacgtcactgtggacgttttaaaacacaacagggttatgcagactttgaatacaatagcttcgacaaatatccatttttatcgtgttattatttctaaatgctaatgtatattccaaagcagcattaattgacattccaatagtataatgcaaaaagtttttaagtctgttatgtaatgctgctgagctcattccataaatgtctttcatttgattaaatgatttattcataatttctttttttaatgaatcttctggaacataaacatttgaagcaattatattagcttctgtttcaatgggctgaagctcttcaggataaggatttccttggctcttttgcgcatttattaaagcaacagaacttttatatgtggggtcgtctaatgcttgataagcatgtgaaagctcatgaataatagtaaatattattcttccccaagtattaatacttgcatttaaaaacataattggtccactagcgggaaaaagggtaaagccgcagactctatttgcaaaagtagtacttacttcatcaatagattgcgctgtaaatgaaatatttctagcagttaatccataattaaaatcatttaaagcattttgaccattattttcaaaagggaaaattaaattaggtgtataagcacatatatcgcatgtcccgattatcgaataaagatagttaataaccattggataccttacctctgatttaggtacattgtattttaaagcagtatcttcaactatagaattagcaatatcattgctactttcatatgaatcttctggtattaatctatattcgtatccaggcatattatttttcactctttctacgtcttttaacaatttgctttgcagtgttcatcaaaatacctaaagaatcttgaaaatcttgtttttcttcatttgacattccatcggtttcttttctaaacattgctaaaagttcttgatcatttttgttcagcgttacagattcatctgtaacatcatctaagacttcacttaatggtactttaaaaaaatcagcaaccttttgtgcactagccgttgaaggctttttcgtttcccatttgctgatgattccgttacttaaatccatttttctttctaattcagctactgattttatatcaggtcttctttctttccaaagcctcattacattgtctttcgcactcattttatactcctttattttgacacgacataagaaatagaacaaaatctaaaataaatgcttgcaatttagaaaacgggctattataataaaaactgttcaaaggaaacatagcaaaaaatcttttgaaccgccttttgtaagcataggtcttacgatttggcttatttcttatactcatataatagaataaattctattataaatcaatataaaatctaagaaaggagtctaatatgtcactttattcagtgattaaagacattgcaaaggaaaaacacaagtcaatttatcagattgaacatgacttgaagatgtccaacggaatgatcagcaaatgggatagaagtatgcccagagctgattcattacaagatgttgctgactacttaggagtaacaacacaatttctatttaagttagctagagaagataaggaggaaaagtaattatgaaactcttagattttgaaggtcagtcagttttagacagccgagatgtcgcaaaaatgattggtaaagaacacaagaacttaatgcgtgatattcgtacttacatcaaagatatagaggagagctcaaatttgagctcacgtcagttctttattccaagcacttataccagtaagcaaggaaaagtattacctaattatctgctcactaaacagggatgcgagttcgtagcaaataagatgactggtaaaaaaggaaatcaatttactgctcaatatgtgagtttgtttaatcaaatgaaacaacagattgaaattccaagtaaattcaatattcctaaaacattgcctgaagctttgcgtttagcagcagatcaggcagagcaattagcaaaacagaaaccaaaggttgattatttcgactcccaaatgagaaaccctggtcttatgacaactaccgaaattgcgaaagattatggttggtcagccaaaactttaaataaagagttgaataaacgtcacattattttcaaacaaggtaaacattgggttttatatcaaaaatatgctgacaaaggttatacgcaatatgaaccatatgattatcaaaaaaataatggtcaacatggagttcacaacaatcttaaatggactcaaaaaggcaagaaattcatttatgatctattagctaaagatgatattcatcccgttgcagaacaaatgaacttgttagaagtataggccaggtgatgacaatgcaactagtcattaatgacactgaacttcaaaaagcagttgatcaaattatgaaagaacgtggctatgtccctgaagagcaactgcaaggaagaacaatcagtattgatgaatttgctaagaaatacgctaagccacacggacaagcatgggtaaaaagaaatattctttatccatttcaaccggattggtgtagcaatattcatccaggcagaggcggtaagatgacaatctttgaatatccagctgctatttggatgaatgaacatagaaaggaaattgattgggatgctaaataagaattattaccgtgagtttaataaaccaatccaacataaagaaagccattatgaaactatctttggtggcatcttaatagcagtcgtgatcttaacgttcactcttttgtgctatggcttttgggatgcagcatttcaaattattggaggttaactcatggaacttagcaaagaaacacaacaacgaatttgggcaattactgatgtagttactagtcagtacgaaacagggagaaaaccatcatggaagcaaaacaaggaaaagaattagctaaagaactcaactaccaaaagattgaaaaacagcgtgatttttatgctggttgggattgcttaacggtagttgtagggaatacagttcatgcaattggtcagaattgtgagtacagaacaccacttgattttattgaagaacagttagctgatgacgctgataaattcatggttaaaggtcaattcacagatgcaaaggatatgtatcagtacttatttgaaaactgtgataatcgtgaagaattaaccagcttcctagaagactattttgacggaatggagatggctgactatggaagataaggatcttaaagactttcaagattggattaaaaaaatgcaagatgatgcagacgattgggtaatttatttagtctatcaatctaaaaagaatggcaaaacttactctggcgcaatgcgttggctgaataaaaataaaccagatttgccaggtaaatttactgctagcccaagtgaggttgtagcaaatgtggttcgatcaatttatgaagaagcagtaattaaggtccgtaatgaaggtttagataaagaggtagataacgatgattgatcaagattggttaaaagatagcattaagcaagaagcgaagttaaagtttgctgctagatgggaaaatgcagaatttaattcatccgaagcaagacaagcttttcaagcaattaaaaatactgatgagtgggaagcattcaagaaagtaatgatccaagcatatgaaaaagcaattactagcaatgtccttaatcagcttcagggcattaaaaatttgattcgcgatgcaggtgaagaataatgccagcatttaaatggagtgaaaatagaaagcctaattatagatggcttgtctacggtattgctggtgttggtaaaacaacattgagtaaatatcttaaaggaaaaagttacttgcttagcttagataaaagctttgaaagagtgagattttggcaaggtaacgatgatatttgggttctggatccagaccaaccaatcgaagacttaaatgacttttatgatttttttgatcctagtcaatatgacaacctagttgtcgataatatcagtagtctgcagaagttgttttttgtcgaaaaggctaaaggaaccaaaacaggattagctaacaagatttctgattataatgaatggaatacatatttaattagatttatcgctagcgtttttaaatggaacatcaatatcttagttacggcttgggaagcaaagtaccaaattactgatccaagtggtcaagaatttacgcaatatggtccagatatcagagataatccacgggattatttaatgggtagctgtgatgtggttgcccgtatgatccaaaaaccacagtcaggtgagcgtgggttaatcatgcagggaagtatagatacctatgctaaaaaccgcttagacgagcgaaaaggcagcaaagcagaagactttttcaaatttgaaaagtcggatttagaaaaagcggtcgataaagttaaagaaaatgcaaaggagaaacaataatgtttaacaaaaatgtaaatgaagacttaaagctaaaccaggaaatggaagacaaagttgcagaaacttgtttgaagattactaataacgaaatcaagcattttattatcattggtttagatgatgatggaaatgaaattcgaatgcatcatggtcatggcattgtattatctggtctcgttagagatattcaacgagagattgatcaagaaaatgatcataccagaaatgccagtgattttatcaagatgatgcagaaaattaataagcaagatgattaaatgtttcaattatttgattatcagcaagatttaattgataaggctagaaatgctctagcagctggaaatcaaggcgttttaattgttagccctccaggatcaggtaagtcagtagtaatcagtgaaattgctaaattaacagtaaaaaaaggtggccatgtattattctttgtccatcgccaagaactagtaaagcagatcaaagattcttttaaacagcagggtgtcgatttaaaccattgcaccattctcacggtaggtaaagtagcaaatagattaaatattttagccaaaccagatttaatcattgttgatgaatcacaacactcaagagctaaaacatatcagaaaatatttaattattattctgatgttccaaggcttggttttaccggttcaccatggcgtttatctggtaaaggatttaaagatatttattcagctatggtattaggcccaactgctaaatggttaattgaaaataaaaaactggcaccatttacagtctatggttaccagttaggtgataaatcaacgttaaaaagtggatcgacaggagattatacaaaaaaatctttaaacaattacactaagtcaattatacatggtgacattgtaaaatcatggctcaagtttgctaaagaccgtaaaactattatctattgccattctaccagctttagtaaggaagtagcacagtcttttagggatgcaggtataaatgcagttcatgcagatgctaaaactcctgaaagtaaacgtgacaagataatggttgatttcaaagaaggcaagatcaaaatattatgcaatgttgatctagtaagtgaaggctttaatgttcctgactgttcatgtgtagttctattaagaccaacacaaagcctagtaatttacttacagcaatcaatgagagccatgaggtatcaacctaacaaacacgcaatcattattgatcaagttggtaactttgaaaggtttggtttgcctgatactgattacaagtggactttggaagatcgtgagaaacatccacgcaaagatagcggtagtactgaaggattacagattaaaacatgtcctgattgttttgcagttattaaagcagaatgtgtgaaatgccctatctgcggtcatgatttttcaattgaaattagaaaaattaaacaaaagaaagatcaagaattaagagctattaaagcagaaaaattccatattgatctaatagcaaagaaaaaggttagtgaactaaccagttttaaagaattaaccatgtatgcaaaggcaaaacattataagaatggttgggcttggcacatggctaaaaggaaaggatttatttaattatgggttttattaatttaaacgaaaagacaaacaacagaagtgaactatttccaaagggaacttatgaaatgcaaattgtaagcgtccatggtgatgcaagccctagcggtcatgaaaatatgcaatttgattttctagttcgtaaagacttagacaaagtttctgcattagctaatactaatgcaaaaacacatggtcgccacttctttgcaaatgtttggactgctaaggataaagaaaccggtcaagattcaggctcatatgatccagcagatttggcaaatattgcagatgcaattggtttaactcaagctcaaattgataaatacatcaagtcaaaagaagatttgatgaaagcatgtgaaggaaaattcattagaatctacatttcagtaggtgagaatacttacaaaggtgaaactcgcaaacaaaatagtaccttcactaattcatggcaaaagactaagttcccaccacaagctgctaaaaagcaagaaactgtagaagatccatttaaaggtaatacaggttcaacagatgaattatccgaaaatgatattccattctaaggagtgaagtaaatgggaaaatttacctatgaaaacatccctcaagaattgcgaagtttaaagcaatggggattgtttcaacttaaatgggtaaaggagcggaataaaaataccaagattcctattgatccttataacggtagagctggtaaatctaatgatcctagtacatggtcagattttaatacagcactaaaagcattagatgaaattgaacgtgctgatggcttggcattctattttactaacggatatgtagggcttgatattgatcatatttcagatgatttagcagattggcatcaaggtgatagttctgttagcaatctgataaacaaattccgtttaatgactgatgaaacttatatggaagtcagccaatctggtacaggtattcactgtatttttaagggagagattccaggcaatcgcagacgtaaaggcaattatgagatgtaccaacaagggcgtttctttgcactaactgggaacagtattggtattcctaagattgtcactctttcaaaagaaaagatgcaagctctttataatttcttatttggtgctgataaatcagtgccggataagattgaagaacctgaaattacagcgctagatttatctattcctgacatcatccaacgtgcagaaaaatctaagactggtactcgctttaccatgttcatgaagggcggctgggaacaattctataattctcactctgaagcagatatggcatttgctaatgaccttgcattttggactggtagagacttccacaaaatggatacgatttttcgtaattccagtttaatgagagataaatatgatgaaaaacgtggtgctactacttatggaatatcccttttaaataaagcaatcagtgaagccgttaatatttataatcctgagcaagatgggaaagagccagatctagtctttaactggaacaaacctaaaaaacgggctgttgctcgttcatgggatgatacaggaagaggacttagattaaatgatcagttcggtgatgtattcagatatatggcagctgataaaacttggtatttctataatggctcatattgggaattagataatggacggcatattgagttagcagctgaaaaagttgttaatttgattaaaactgaaaatcctgatttcagctttgctactcagcaggataaagataaagcaatgaaagaatggaataagttcattaaagaatcacgttcccatatggcaaaaatacacatgattgaggagtttaagaagtacgtaactattgatcacggtgtatttgatcatgacaacatgcttctaaacactgaatctggttatgttgatttaactaacggtgaattgaaagatcatgatattaaaaagatgtttagtgaacaaaccgcatcagaatattcagacaatattgattgtcctatgtggaaagacttcctagaacaaattttcaatcatgatgagaaattgattcattatatccaaaaagctgttggctactcaattacaggatcgactgctgaacaagtatttttcttgctacttggtactggtagaaacggtaaatctgtatttatcaatactatcagaaatattcttggtagttatgcaaagcagatgtcagttgagtcaatcatcgtccacaattcaagcggaagtgctaatagtgatattgcacgacttgaaaatacacgtttagttaccagttctgaagctaatgaaggttcacgtttagatgaatcgttagttaagcaattaactggtggagatagaatcctagctagatttttatatggtcaagaatttgaatatgatcctaaattcaagatttggatggctactaaccacttgccattcattagaggaactgatgaaggtatttggagaagaattaaggttgttccattcaatgtacaaattccagctaacaaagttgataagaatttggaaaacaagttaaaagctgaatggactggaatcttaaattggatcgttcaaggcgcaatcatgtggcaagtagaaggcttgaaagaccctgaagttgttcaagatgcatccaagcaataccgtgaaaacatggatccacttgaagcatttcttgatgaatgctgtaaagctggtagcaattacactatcatgggtagacctttatacaatgcatatcgtgattgggctagagaatctaatgaacatttgatgtctatgactaaatttggtagagaaatggctaagaaattgcctaaaaccaaagaaagaaatggaactcgctatgtaggcatccaattaaagaaagaaccacttcattttgattggaattaatggctgtgattagttgcggttagttgtggttggttgtggtgagtatatgtggtagctcaaaccgtttgggctgtaggggtgtgacgtgtttcggttagtgtggttagtttaaaagcctatattattatatttattttcttttttataatttactttttaaagaaaaaagtagtaacactaaccacaacactacaggctgtaggcgtaagacccaccacaaactcaccacaaactggtcacatttttagccaacccaccacgattagcagtctactatattgagtgctaagaaaaataggtgacaaattggcaaaagatgtcatatcggtatttaccaattagcaatgctatacaaaaactcaccgctgatattttttgtgacggtatcagttaattcactacacttcatcagtgtggaagtcacttgagaggaaagaatatttaaatttgtgtaaatattgtgaaatcaacccaaagacaaagctaggacgcgactactacagagatgactatgttgatccagatgagattaataaggtgaatggtgaagacggaataatgtttacttacatcgattgtaaaaatcatccagctttaattatttctcatcctgatcctgagtgctattctcaggaaactgacaaaatctttataggtaattgtccctggtgtggacgcaatttaaagaaagaacatcaaaatgaacaatcataatttagctgaataccattgtgaacattgcggcagagaatttattattgctgaaattgatgatattaaacattgcccttattgcggagatatggacattgctagatatagtttgctaacgataactattgattaaaggagcatgaaaatgaaagatgaaaacggacgtgatattaaattgggtcttgaagaagctagacacataatggctacagattactgtgtaagatcagatcttgctctatgtggtgagttctttaatgaatatggtatgttgcctcaggagtacataaaggagtatggcaatgaaagtaattgataaaagaacgaagaaaactaatgaggattacaagtatggcgatattttaatgtgttgggataatgatccagatgaatataatctgtttagaatctcgactttttatgatagttattatgaacaagatcgttgtattgttgtaactatacacagtagtagtgacaatgaagcaaaaacttgggaaggattatttgactcacctaaagaagcggctagggacttaaagaatagttataaccacgctgaaaaagtgaatgcatacattgtgattactgattaacggaggaataattatgtgcgattactgtaataatgaaaaatcaattatttcaattgaagatacatacgaagatgggtacacaggtattgatagatatgaaaatggagatgtttatattaatggaaatgaattaaatttatcttgtgatgtcgaagttacttatgtatcaaagagtagcaagattaactattgtcctatgtgtgggagaaagctagaaagtgaaaattaaaaatgaatgcagtttcaaaaaaaagcatctgtccatattgtcattttgaaagtggatcagaggatccgatgaaaactttttatacagatggctgtgaattatttatcagaaaagataattcactagaagtggttcttattgattattatgatgacttttcctttaaacttgataaaaaaatcaaattttgttctatgtgtggtaggagattagataaatgattattagtttattttacagagtgaaactattttttaagcaattattttgtcatcacagttatgtatataaaacatcgctgtttagccttagcgactattatatttgtacaaaatgtgaacatgttacatataatcgaccaccgaaggaactaatgaaaagagttgaagacgaatgacatcagtttcaagtagctgctatctttgcagtacattaaatgcttttcacgatggaccggatttatatgcgccaaaaatgaatagatttcacgttaatctaaatgaaatggatggcaagtggtacttaacgattaaaggcttgccttatcctattaagtattgtccaaattgtgggcgaaaattggatgagaatgcaaaatatgaagtaactgattggttataaatgacagcaaaacaatatttcaatttaacattaattttaatgaactggttaatagtcttaatttctttttgttttaaaaatgaaaaattagatttccttatgtttatttggaccagtatatcgtttacatatttaatgcttagttaacaggagataataaacatgacaggaaaaacaattaaatttcaagcaacaacaaataatttcaaagttaatggtaataaagtagttttgcaattagatgcagacctgcttactcataagattaacttaaacaagttaaaagacattgcttttgatggcaatggagttcaagtaagtcttgaggctgatcaacaggaacttattcctgaagaaaacaaggataataagccaatgctagttagggatgacaagtaatgaaaactgcactgcttgtattatttgcaattctttaccctacgataagtgtactgaatttgttttcagattataaaaccatgaagtctaacaacgatcttatgaaagaaattcataaaagtaatgatttatttgattctttattggaagaagttcaagcaaataaaaaattaactgaagctgtgcaacataaagctactgcacaagataattttatgtgggaatcaattgtaattcttgcaaaaagaattcataacctggaggacaacaactatgttaaataataaaaaggctatttttcatgacaagaatggacgaaaaatttatccagattcattactttatgatgaagtcgctaatgagtacttttttccttatcgaaaaaatggtgtttggggtgatgactttttaggcgatttctacccacttaaagcatcacagttaatcttacagaaaaaacatgcaagtatggatgacatgaaattactgatgaaattgcctaatgaatcagacgcaattttcaacacggaagggtttatcaatggaaagtgaacatagtatacaaaagaaaattgaattagttgtctcacaacatcattgtcatatattccgtgctaatgtcggtaaaattagaacgcctgatggtagattttttactacaggcttgccgtctggctatcctgacttgcatggctggcgtgattgggatcatcaagctttttacattgaagtgaaaaatgctactggtaaaccgcgtcctgatcaaatagctttccataaaatgttgatgaaattcaatgttattcatggaattgcacgaaatactaatgatgcacttaagattgtggagaatggtttagttggctatggatatgaatagaagaggtgattgtatggaagtaacaattgacgcttatacttacgatcaattaaaagattattgtcaacgaatgaacgaaccaatgtcagtcattgctactaaagcaattaagaagtatatcgatgcgagtgactaatatggaattaactaattatcaacgtgctttagtaataattcataaattagaagatcggtttggatcaatttctaaggtacctgaatctaatcctaaaatgcaagaaatccatagacttttgccgatgggacgtcaatctgaagacaaaaactatgctcgtactgaagagcttaattatcttggctattcaaacgcacatattgcacaagttactcatcacggtcaagctacgattaattcttatttcgaaaagcatagtattaaaccaaaacagattttttactataaagttgtagcacctgatcattcaactacttattatgctgacactttaatacatttatataaaattatttttaaaaagaaaattgctaataataattatgcgaaaatacattttcttaaacagggatatgctgttcgaactggcaaaatcatttggatgaatgttatggataactcatattattgcgtgaagaattcatcaaatctgtatattaaaaatgggcttgattcttatatgaactctaaagcataaatgcttggtatagcttataatagatgtattagtaattgttattcttacctattatatggagttgattgttgtgaatatttggtctgatgtagattttgataagactgctaaccgtgttgataagttattaaaatataaacttcctagattagctaggcgatgtggacgtagtttaactgatttgtctagtcctcaattgtctagcgcttcaagtcatagtaatcgcactgatggacaagagagaatgatggttaattcttttagcattgagaaggttgttgacgcaatatgccaaacgattattaactgctcagataatagtaagctaatattaataggtaactatattaagtacatccctcaagagcaattaattatgcagctaccctatgaaaagacctactattataaagtacttaaaccaatcgcacttaatgagtttgcagatctttatgatcattggcaagatgaatgtgatgttgaacctgcagatcatattgatctgcatgtatatgtgaaagctgatgcaatttagcttatttattttttaccttgccagtgaacttttagtggacaatcactggacaaacagtgaacttcatgcggattgaaacatggcacaatatgtattgtcggatagtaaagaaaaaggtccgatgtcataacacaacaatcttagttttcttcatgttgttgtctgcattcaattgacaactaaatagacatttaagtacaacatgattaataaacacttggaagaatattttccaggtgtttttcttttgcaagcatagtgcaatggctagcacaatagtctccaaaactattaatctaggttcaagccctagtgcttgtgtttatcaaatgaaaggagccagtcaatgccacgagttcgcagatgtcgttttccaaactgtcatgagtttgcgatgatgccaaatcattattgcaagaaacacattgaacacgaaaaagaattgcaagaacgcaatgagttttatcgcttgcatcataaacgcagcaagcagtcgcaatggcgatacaatcacatcactcgctatcgtaatccggtcaagacagagcaaaacaaattctatcattcgaagcaatggcgtgagatgcgagcaatagtttttaaacgtgattaccatctatgccagtactgcaaggctagaggtcaattaaatgaaggtaacattgtagatcacgtactaccagttgaaaggtatccagaagaaatgaagaatcttcagaacatggtcaccagctgtggaagatgccactactggaaaacacgttttgaagagcaatattatggcacaggacttcatggtaaaccaacagataatccgccaataacggacgtaaaattgattgctaacttggcggctagattgaaaaatgatcacgctgtaaatggctaaaaattcgcttctaagagatttaaattttgtaagtgtaattatacatgaatcaaaaataaaaagacccccgccccgttttttaacgtctagggagccgcatcagtgccgttttcttgtgtcacaaacaaaattttaaaagtttttgaaagggggctgaaacatgaacaaagttgatctatcaaagccgaaagtacctaatcaagcacctaaatggcttggaacttacggcaaatatttgtatccaaaacttgccacttatctcaataagaatgacaaaatcttacgtgctgatgaatatttacttcaacaatactgttcagcctacgacacctaccgcatggcttatgaagaagtccttgaacatggtgttcagcaaccaatctataaaacggtcgtctctcctgtggatggcaaggaagttgctaagaattttttaggatacaagaaaaatccagcttatcagatcatgtctgattcgttgaaacagatgaataccattggtaaagaattaggattaagtcctaaagcaagaagtcaaatgatggatttaaatttacctactacagatgataaaaaaacagctgttcaaagcttgaaagatttttttaagtgattaatttattttaggttttgttgattatacacaaataattgtgtataatatacttagaaattgaaaggaggtgaaagatatgccttggaagccagctaaaatggttcgttttttaaagaagaatggttttattgaattacctaaaaaaggtggtcatagaagattttttaatccaactactggaagaaaaacagaagttccaatgcacagcaaagaacttaaaaaaatgactgaaaaagccattcttgaacaggctggattagaaaagccaggaggttaagcctcctagctttggcatatcataaaatatgaagcaaaatatcgtagcttatcctgcaattcttagtgaatataatgatgaatcaggtcattattatgttgtaacttcacctaatattcaaggtatggtaactgatggtgaaactattccagaagcattagtacatgctgaagatgcaatggctgcaatgttagatggtgaagaaaaatatcctaaagttcaaaatcctaaagaatggaaattaaaagataaccaacaagtaacatgggttacggtcaacatgacaaagtggctcaatcaatatggtaaaactgtaagaagaaatatttctattccagaagctttaaatgattgggcgaaagaaaataaaattaacgtatctaaagttgccacggatgcattaagagaaatgcaaggataatttttagggcttaatcacgtttttttgtgattaagcctattattttgcctaaaaatagtaaaaaagaggtgattgatgcaatgaaaattgatttaacacaaactcatgacgttgatggtgcttatcaggcaattaactataacgacattagaattaaatacaatgatgatgccacaaaatattgttttgatgtattagatggtaaaagattagctggttatattactaagcttgcttgtttcagaaacttacaagacttgaaacgtcaaaatacatctgattttccttaccattatgatgttaaagaagtacaaaatacttttaagtttgcatcaatcattccagacgttgatttacataaaccacttccattaatggattggcaaaaatttattctagctatgattaatggctggaaagatgcaaacggtgaaagaagatacactgacatccacataagtgttggacgtggacaaggcaaaacacaaatagctggtatccaaatgtgcaaggctgtcttgattgatacgcttaacttcactaacaaggacttcttgattactgctaatacatctgatcaatcaacaaagttgtttggttatgttaagaaaatgcttgaagcagtcattaagattgaaccgtttgcatccatagctaaagagtcagggcttgatttacagactaaccaaatcattgaaaaagaaactaacaataaggtatggaaaatcagttatgaagctgataaatacgattcaacccacaatgttttagctatctatgatgaaaccggtgctcttgatacatatgatagaatgactgatattacagatggtcaagcacaagtaattccatatcatcaattcatcaaaattagttctgcttatcctgatccaacaagtccgtttcatcaagaacaaattacgatgcagcacatcatggaaaaagattatagccgtgaaggtgataactctctctgtctcgtgtgggcgcaagatgaccttgatgaaactttcaagcctgaaacatgggaaaaatctaatccattaattggtttatcagatgaagaacgcaagcgtagaactgacaatttaattaagcaacgtgatcaaggaatgcttactaatacgcttcataagttccagaataagaacttgaatttgtggcttaaacaatcaactgctagctatttgaatttgaaagacgttgaaaaagctatcaatgatgatttcaagatcgatggcttaatttgttatatgggttttgactactcaatgttttctgataatacagctgttggttttgcttttccgtataccactcctgaagggatgcataagtggcaaatgatgcaacattcatttattccatggcaacaagcaggaagtattgaagctaaggaaaaacaagatggcttgccttatcgtgaattagctaaaaaaggttactgcacaattactagtcatgaaaaaggcattatcaatcccgaacaagtttataaatggattcttgaatttactgaaaagcatagactagatgttaagttttttggctatgaccggtatggtagttatcaagttaaaaatattactgaaagccttaatgcaaatacaggttggttgattcaagatattgcacaacgaacttcagaacttgctaatccaactaaattcttgcaagaagcttacgctactggaaaaattacacgatttgatgatccaatcgaagaaacggctctcttaaatgctgttattagggaagacaagattggtattcaagttgataaggacaaggctactaagaagattgatgttgtggatgctgaaattgatgcaatgtatcaaggaatgtacaactttgaagattatggattgatcaatgacaaatcacatcaagtagaacggatgacacaagaacaagtgcttaaatggtttgaaaatcctgattctggtcttttgggaggtgaaacgggtgataattaaaacgctgtttgaaaaaatttggaaattcttagatgtaatcctttatttattgggctttggctttattgtcatagctctttttttatggaataaaatagcaggttttgcaggtctaggaattgctttacttttaacaggcttattaattgatctactcccacatggtcagggaggaggtgatagataatgcctgtttttaatttaaataaaagcaatgtatcaggctacagcttaaatgatcctgaatttattactttatttaagaatgatttatctgttagtgagtatgtttccgcagatactgctttaaaaaattcagatattttctcattgatctcacaattatcagctgatttagcactggtaaaaatgaaagctgataaagatagagcacaatcactgattgataatccttctaatttaactaatggctttagtttttggcaagggatgtttgcacaactgctattagatggcaatgcttatgcctacagatggagaaatatcaatggcgttgatttatattgggagtttttaagaccgtctcaagttcaagtgatgctcttagaggacggatcaggattaacctacaacattaattttgatgaacctgatattcaaacaaaggagaacgtaccacaaagcgatgtgatccacatcagacttgtatcaaagaatggtggtaagactggtgtttcaccacttactggtttagctaatgaactaaatatcaaagatgcaagcaatcgtttaacactccatgctctttctcaatctgtggaagcaccaggaattttaagtgttactggtggcggtctgcttgattggaaaaagaagtcagctagatcacgtgaatttatgcgtcaagttaataactctgataatggtccgatcgttttagatgatttagagacctatcaaccgttggaagtgaaaagcgatgtagcaaaactactgcaacaagcagattggactggtaagcaaattgccaaagtctatggtgttcctgattcttatattaatggtcaaggtgaccaacaaagtaacatcactcaaattggtggtcaatatgctaaggctattaatcgttatgctggtgcagttcaaagtgaactatccaataaattgaacagccaaattacctatgatgtgagaccagctattgatgcaactggtgataactttgcatctgaaattggtgatttatcaagtaaaggaattttgtcaggcaatcaagggcgctatgtattacagcactatggttatttgcctaatgatttacctattcctgataagtcaattattccagcaaatgaaggaggtgaagatgatgacgacagtaccaatcaagggaataatcgtacccaataatttaggtgatatttattcatttttagggtatgaagtggctagtcctaatcaattaaatgaagcgttgagtaatgctaatggtcaagacgttatattggaaatcaactcacctggtggttacattgatgctggttctgaaatgtatacagctttaaagaaatatccaggcaatgtaactgctcaagtagttggtcaagcttgctctgctgcttcatggattgcattagcggctgataaagttgaaatgtcaccaaccgctcaaatgatgattcatagagtaagcgttggtgttgaaggtaatgtagatgatcttactagtgcattacaatcattagattcaatggatcaaacctatgttgatctttacagcaagcgaactggtttagataaacaagaaatttaccgtatgatgtgtgcaactacttggatgaatgctaaacaagcggtagataaaggttttgctgattctattatgtttgaaaatgatcaagcaccagcggttgttaatgcttatggagtgcctgttttaagtagcggtgcaattaataagattaaaacattaattcatgaaaagtccgatgatgactctaaacccattgagaataaacaagatacagataagggacaagtcaaaaaagacttgtcccttttgttatggcaatagaaagaagagaacgtatgaatttacaagaattacaaaatgcttggattgaagcaggtaataaggttactgatctctttaataagaaggtagctttacaaaagaattatgaagctgatcctgaatctgtttctgctgaagatatgaagaagacggctgaaaattataacaaagctgttcaagctcgtgattttgctaagcaaaactatgacgatgctgtagaagctcaaaaggttaacaagcctgctaataagcctgttgaaaataagactgaagaaaagtcgaagaacattgcttcaggtttcaaggatatgcttagaaacccaatgaagtacatggaaaacttatcatcaagttcaactgctgatggcaatgctggtttgactattcctgatgatcaacaaactcaaattaacactttgatgcgtcaatatgatgacttgcgtgatttagtaactattgaaaatgttggtactgatcacggtactagaaacattgaaccattctctgaaattattccaatggatcaattggatgatattcctgatgattcaactaataattcagactataagtggcaagataaggacattaaggaaggcaattacccatcagttaagcaacttagctataacattcatgattatggtgatgtattctttgctccaaatgatttaatcaatgactcaaacgcaaatattgaagcatggttaaaccaacacattgcacgtaagaatgttgttacctataactcaaagattgttggtttacttcctaactcacaaaagaaggctactatcactaagcttgatgacattattgatgcattaggtgaattggatatggctttatggggtggcgctaccttgttaactaacaagtctggtttcttgaccttagctaaggttcgtatgtcagacggttcacgtgccatgaacgttgatccacgtactcaacaaaccaccttcaacatggatggtatgcaatacattaacgttcgtgtggttgaagacagatacctttctaacaacactactgttggtggcaagtatcaaagccatccattttactttggtaactttaaggaatttattcacatgtacgaccgtcaacaaatgtcattgcttacttctaacattgctgataaggcatttagacgtaaccaaactgcgatccgtgcattgaacagatttgataccaagatttgggatgatgaggcgatgatttcaggttcatttgataaggttgaaagccaaccaatgcttatgcaagcagttactgcaccaacaagcactgattcaggtaagtagtagaaagtaggtgatcaataatgaccacttatttaaaaattgatgatgggcttaagcgctcacttggttacttgcctgatgatgatgcattggattcttcagatgaagaacgtatggaagcaacactgaaaggtgctgaaaattacgttcagggtgcaattggtgaagatgctgatgatagtttttacaaagatgattcagtgtttgagctgtataagctagctgttaatgcaattgcaactaactggtttttgcatccctctgctgctgtgtcatcaactacagcaaaacaaatcataggtcaactccgtgggacttatgatgaatcaaaggtggtgaatgacgatggtgcaacttcagagctgggacagactaattcataaaattgtgtttggtactgttgatgatactgaagatgataacggtcttccaacaaatgagtttaaacgactcgcaaaacctacactatgtggacattggggattaactactggtcaaatagttcaaaataaagggcatcatcgtgatgattcatttattgtagttattcatcacaaacgtgattatgatggtatcactcatgcaatgcttaacaataagctttatgaagtgagtgatattaatcctgatccatttcaaaatccaactgcaggagatttgatcactctcacacgagtgactgatcgtgatggttgatttagataaaggcttaaatgattggctagataaaattactaagaaagttaatctatctaccaatcaaaaagcagaaatcactggtgaaggtgctaagacttacgctgaagttcttaaaaagaatactccaaagtctcatgcaagctatgcacatgcaaggtcagctggtcatggtcgtaagtctaagcacatgagagatgccattacttataaggctggttatgaaatcaatgatggtcaaactggtgatacatctgtaggttgggaagataaatataatgcattagtcgcacggtttgttaatgatggaacacgtgatatgtctcaaaaagaaatatcaaatctacattttaaagaccatgcagaaaaagaagctgcagatgcagtactaaaagctaatgctgaaaaatttagggagatattagataaatgactactgttgcaaagcaggtagttgatcttcttaattcttccaattttcccaaattgcataaagcctactcttttgcggttggaactagcgaacgtacaccacgtgaatctgtggatgtactcgttagtgaagtggattttgattttgatgaatcaggcagtaaccaatacacggaacagatacaacgtttagcgataaacgttttttatagtaaaaaaacaacagtagacatgaacgattttgaacactcgctcatgtctttttttgtagctaatggttggcaaattgtagctagttttgcaggtcacacatacgaccccaattctggtgaaccaacaattagctttcagataaaaaggagaattacatggaacttcaaggtttaaatgatttacttgttttcaagttcgataaggacggtaagcttgttaccgatgaatcaaagggcggtttgaccaccaacattggtaaagatggtgtatttaaaattgatttggaatccagtaaaggtgctactcaagctaacatcactggtctttcaagaactgcacaagctgtttacggttctaacgcaaaggctgaacaacactttggtgcatatcaaattactggtactttcggtgctaacgacattccacataacttctatgatgcaatcgtaggtcttgaaaaggatagcaagttaggctttggtaacatggctaaagatagtactccacttgcatatggtggtgttattgctcactcatacaactcaaacgttggcgttgatctttactttgcattgccatacggtaacttgactcctggtggtgacttaactatgggtactgatactgaaaacccaactttggtacacgatacattcactcttaatgccgctgcacgtccatcagatggtttagtttacgaaaaattctattcagatgaagatggatttaactttgacaagatgcttgattggattatttcaggtactgttgctggttcaggtactgaagatccaactcacaagagtgctgaccaaggtggtactggtgatctaaagaaagatcaaactacttcaacaggcactcactaataattaattagtagggtgggtagcggtggcaaattaatataaataattttgttaagaacggtgtgaaagccgttctttttctttttttgaaaggaaaatcaatcaatgttagtaaaaatcaatggtaaaaagcttcatttaactacttttgaagttgaaacaactgtaaaaaacgtacgtgcatgtttaaaggcacaaaaggtttttgcaaaattatcaattgcaattaataaggttaaagacgatgatgaccaatcaattcttgatgttttaacagcacaagaaaatcttttggatgaagaagaaaagtttttgaagaagattttgcatttatcagatgcacaagtagataagattgaagattctgctccagaagatgtaagtaaatttgttactgatttaattggaaaaatcttacaagtagacgactccaaaagcgacaacgattaatgatcctgatccagtacatgcctatgaggaaatgctggaagattttgattatcaagaacaacaaatgattgttaatgctcatatgtccctagaagattatgaaaacactgattattaccgtcttgtggaagtaatgagtgcaagaccaaaggacaaacgtccaatgagtctttgggactttgcagcaagtttagacaaaacagaaaggaggtaaataaatggcaggaagaataccagttggtacactgattacagatattaaattaaacggtgatcagcctgtaaaaacgttacgagaattaaggcaagctgtatctagtactaccagtgcatggaaagctcaagaagctgttttaagaagtgctggtaagactactgaagcggctgaagctaagtacaaaggcttatctgatgctgtaaaaagtcagcgtagattaattgatggcttagttgaaaagcaaaaatctttaaagaaacagcaagaagaaattgatacttctacagataagggcaaaaaagcttatgaaagtatcagtactgcacttcaaaagaatgctactcaaactttgaaagctactagtagattagaatcactgactaagcaacaggataaggctaaaaactctctcacttactacaagtcaggattagcagaagctcaaaagactttaaaaaccactacggctgtttcaaaatcgtatgttgatcgtttggaatctgaaggcaatcattataaagctaatgaagctagaatttcaggttatagaagttcgatcagtaatttaactaagcagtatgaaattcaatcacgtgaattaaaacgtattgcatctgaatctggtgcaactagtgaagcttacaagcgtcaacagatcagagtgaatgaaacagcgacttcattaaataaagcgaaatctgctattagtggtcttgaagcagaacaaaagaaaatcaatcctacaccatgggatagattaaaagctaagatttctagtgttaataaagaaagtcaagaaactcatagaaccttgaaagaggtcttcatgggatctgcacttggtaacgctgtttcaaatgctgtttctaacttaggatcaagccttaagtctgcttacacagagggtatgaacttgaatttagcaattgctaagatcaacggtaggttcaaaggcatgggtatgaataccagacaaattcaagcccttgataagcagatcggtgagttaaagtccaatactgacttagctggtgattcagcatcaaacttgcaagctcatatgcttaactggtcaaccattggctttaaaggtgctatgcaaatggctaaaaccattgctggtgtaggtgatagttctaagatgactggtcagcaaattgaccaaatgtctgcaggactgcaaagaattggtagtactggtaaagttacttattcctccttgagccgtattaccaaagctgctccaacattcatggctacacttgcacatggtgctggtatgtcagaatctaaacttagagcacttttaaaaactggcaatgtaacacaaaagcaattccaaacttggattgctaaatcatctaagtatgctgatgaaagctttaaaggttatggtcaaagtcaagctggtgctttaaaagctatgactgttgctagacaaaaactagaacaggaatttactaagccaatctttgatgctaagactagtggcttgcaagccttgaagaatatcatgactagtaaagaagttatgagcggtgctgaccagctgggtaaagcagtatcaaacgttattggctacttagataagcataaaggtgatattgtagctatcactaaaaatgttatctctctaggcgtggaagttggtaaggcagtttggaaagactttgcagctattattcaaaacattggtaaagcacttggtattgttaaaggcaatggcaaggattctggtagtgcattacatacacttgctactgctacaggtgatttagctaaaaataagactgctgttaaggctatatctgatgccataattgcaatggtagcaattaaaggcatccgtaaagtcagtgatggtcttttttctattggtaaaggtgctgttactacttataaatcagttaaagcattacacgatggtttcaaaggaattgaattagctaaagatgctactaaaggtgaaaaagcttgggctaagtttggtggcgttctatccaagacttttagcggctttagaaaagttggaagtaaaacttggactactgtagaaaaagctggcatcaaagcttggacaggtattgaaaaaggctgggctaaagcaagtgatttaggtacaaaagctggaaaagcaatagctaagggttttagagctacaggaaatgtcttagcaaaggcaggcaaatggagctggagcaaaattaagtctggctttaattttgcaaaaaagtttggtcaagaaataggcaaaaagatttcagcaggaattaaagctactactaagttctctatgggtaagcgtcttgctactggtgctttagcaggtactgcagttgctacacctgaagtgatcaacgctgttaaagatcgtcacaatgctaatgctagaagtcaagacattggcggtgctgttggcgctgtcgctggtggtacattaaccagcatgattccagtagttggtccaatgctcgctcccattggtgctttacttggcaaatatgctggacgttggggtggtcaagctgtcaataatttcaccaaaggctggcaaaagaacaaaccgccaaaaaaattctggtcacttgaaaatctcggctattctgcacataacatgtggaatggatttactaagggtgtaatcaataccattaagtggtttaagaaaaactggaaagaagtcggtttttactttgtaagtccgcttgctggtgctattaattcactttacaaacacaattctaagtttaggaaatgggtgaacagcttagttaaatcatttaaaaatgcttggaaaggcattgggaaatggtttggtaatgttggtaaagctgtgcaaaaagcatggcgtggaatgactcattggtttagtaacttaggcaagaacatggctaagggacttaagtcagcttggaaaggcatgtctcactggtttagcggcattgctcgtggcgtacgcaatgcatggcattcaatgacagcttggtttactagacttggttctgcaatgtctaggggactcaaagcaacttggagaactgttactagatggtttggcggtattgctaaaggcgttcaacatgcatggtcaggaatgtctcatttctttggccatgtaggctctgcatcagtaagactgtttaagtcagcatggcatggaattacttcatggtttggtggtattatcagtggcatcaagaaagcatgggatgatttctttggtggtatcagtagtactgttaagttcattggtaaattgctaggtggcaaggttaaagtaggcaatgttcacttagctgaaggtactgattggaagaagaaatacggttatccagccatcttaaatgatggtcatgattcgccagctactaataataaggaaggcattttaaatcctgatggctctgtggaagttcaacagggtgtgaatgtaccacgttggatctttccatggcaagatgttatcaatgctcgtgatatggctaaattgtttggtcgttctgttcaccttgcaaatggtactgttgatttacatagtcttgaaggtaagagccctgctaagattttagttaatcttactaagcttcttaagaagaaatacgatgaagaccgtgtgcgtcatcaaaagcaaaaagaacgtcataacagaaatgatgcttctactgctaatgagcgtaagcgtctgattaagcatgaacaagatgacaaggctgatagagctaaagtcgctaaagaaattagagacgctctaaagcgtggtaaaaatacccaaggcttgattgtacagttaaacaagttaaccagtcgtattagtagagaccgtaaagccgttgctaagactaatccgcaccacggtgaaacactcgtggatgaaggattattacttggtgctaacagtcgaattggcaagtccaagtggatcagtgatgcactctttaagaaacttactactgctcctaaaactaagaagaaaactaaaaagcgcaaaacaaagaaacgtaaatcaactagaagaagatccacaagaacatccacagcaagacgttcatattcatctggttcaagtcgtgtttctgtaccaaacgttagtgtttctagtgcatcacttaaaggcttatcttctaagtcaatttctgtaactgctaaggtaaaaggatctaagcagatcaaagcccttgaaaaggctatgaagcgtattaagggtggcactcataaggttactgtaaaaaccaagggtgttaaatctgttaagtcactctctaaggcaatcaagaagatcaaaggcaaaaagagtactgttagtgtaaaaacaaaaggtactagccaattaaagtcattacacaaaaacattaatactgttgaaaaacgtcttaatgttttagctaggactgctaaaaaagataagtttggcgaacaaatttctaggcaggctgaaaaggctgttaagtcactcgaaggcaaaggtaatttcaccaagaaaatctctagcatgtctaaagcgactgttaaagatttcaagtcaatgacttcaagtgttggtaaaactactgataagatcagaaaatcaactgaacaagactttagtaatctttataaacggtcttaccaatctgttaagagattgcacgatggtgtaatcaaattaggcactgctactgctcgtggttttggcggtgcaatgcataaaatggttggttatgcatctgattcaatgcgtggcacaatcagacaaatcaaccgtggtattcgtggtattgatgctgtattaaagcaatttggtggtaatagttctgttattaatccagtccactttgctaagggtactgatgcaaatggtcgtttaactcatgacactttagcagtcgttaatgatgctcaatctggtccacgtcaagaagctgtagtaactgatcaaaatgacattattattcctcatgggaataatcgtaggatgctattgagaaaaggttggggtgttcttaatggtactcaaactcaatcactctcacttccacactttgcaaatggtactggcattagcaagaaagaacttagaaagttagcagaaaacagcttaaagcactttgctgatagctttaaatcaatgtttaccaataatcttgatgatgttggttctaatttaactaaagattctactgatttgagtaaacgttctggtactcactttggtaatccatggtctcaagccatgtggacggttatcaataaagccattggctctggtggtggttcacgtgctaagttcttgcaatatgccaaggatacttttgaccgtgttaagtatcaaatgggtgctgcgtcaaggaccttatctgactgttcaggtatggtaatgcaggcacttagacattttggaattaacattggtcgtactactgttgctatgcaggaatcatcaggtgttcagtatttaggtaaaaacttatctaaaacagagcctggtgatttggtcatttttggtcatggtactggtgcagctggtcacgttggtattatcaacaatccaagcaaaggcacaatgtttaatgcctccccaccttatgcacgtatcagtagaatttctgatgcaatgtctatgggctatggttactaccgtgttaaaggtcttcacgatcaagctaagcatcaacctaagattaaacctagtttgttagctttagctaaacgtgaacttggtggtaaagctcttaattggattggtgatcacttgtcagaaaatgaagatggtataggtggaaagcctacaggtgatcacttacactggttaaaacaagccggcattcctgaatcttggtggcattatatggaattgattattgatggtggaaatggaatcccaggtgaatctcactggaatcctagaattactaacccatcaagtggcgcttatggtattccacaatcattaccagcaagcaaaatggcatctgctggtagagattggagaactaatgctattactcaattgagatggatgaaagactatatccgtggacgttatggtactgctaaagctgcatgggaacacaaggttaatacttctactcactggtatgctaatgggggtattgcaagttcgccaagtatttttggtgaagcaggacctgaaatggctgttccgcttattccaagtaagtcaactcgtgcttgggagttaattggcaaggctgtaggtattcttacagctaacagtaatttaaatgctaaccaacaacgtatttctaataaagatgaaaaagatgagcatgacttattaaaagccatgcttttagttttgcaaaaaatgagcgctcaaaaccgtgatattcatatcacacttgaaactcctgaaggtcgcaagctgtgggagttagttgagccgttctacaagcaagaccgtagacaagacatgattaaagaaagaaggggattaagtgcaagatttagatgataatgtgaagctgatttttcaagaccatgcttcaacagattttggcatggtcgtacaaaagccatgggatttaattcatccaacagctgacattgatcctacacatataaaaggtagaaatggtgatttcttacaaaataatcaatcttaccaaaatgtgactgaaacctttaatcttgaaattcttagaccacctgaacgtggttggtttgattgggaacggtctgtaactgattggctctctgctccaactgatcctgatgggcggatgaaatatcaatatcttaaattcactgctgatccaacatatgtgtttaaggctattgttaaagatccattcactgttactaaagatgtaactagtgattttgttggtgtatgtgcaataccgttttattgtcagcctttccaatatcgtattgatggaattgcttatatcccattgcctgatagcggtgtggtagttggtgaagaaaaatggtctgctattcctgattggcacttcattgcaaatggtagtttcactttgtacgtcaatggcttgccttacacgtttgagaatatggaaggtgaattttggcttaatggtgctactggtgatacttatgatgcagatggcaatctatacaatacacaaactcattttcctaaccttgatactcctaaattgtggaagggtcagaatactatcactgttactgctgaaactggcactactatcactaaagctgaatacaaaccaaattggaggaggttgatctaatgaaattaactgtaggtacaattcctgaagttgattatggtgactactctgatttgatgacaatgccacatctttatgacagtattgccagtgattttactagtagcggtattcctcttcctgatgcaattgattgtcaggttaatggcaattctaatcagttttggtctttaactatgacttatccaagatcaggattgcaccaaaaggaaatccaacctaacaaatggattatggaagactgtgatcctaagcacgtacatcaatggtttaaaatcatccacattactcccgaattagataatgtggtggttgaagcggaacacattagtgcgttacttgctaactctactgttgctgatgatattcaattaaacggcgcaactgcacaagatttaggcaatcaaatccttaatcaaatgcaggagcagagagaatttactttctattccgatgttaacaaagtaagtaaagtgaatattcaaggcggccagcaggcaagtaatttgtttattgatcctgatcaggaaggtgatactgttactcaatcagttttaggactgtttggcggtgaatttgattttgataattggaatatcagacattcaaaacgtattggacgtgattctggtattaaagttacctatggtaaaaatatcaaaaccacctttagtcaagataagaacattcagaacatgtatactggtgcggtatttgtcgctaagtatgtaccaggtcaagcaattgcgaaaaataattggcaaggctgggctacatgggaaagcacttacgattcagtaggtatcacttacatggctggcggcaatatcaatatctatgattgtcctgtagatggtcaaaagatcattggtactttgcaaaacgggatgaaactgcacttaggtcagattgttaatgatggttcatttactcctgatggtaaatatcaaattaacactgttaatagcgatagctggtatccaattgcacaaagtgatggcggtggctggattgattctaagtggatcaattttgacacatcaggtgcttatgcaattaacaatgtcagtgggacggtaactgttaagagcagtaatccgtttgatagtgaaggtgtaggttctcgtgttactgttcatggctctgctgtagttgcttacggcaaaggaaaatcaattagagtattttattcacctgaaattggtcctgatcaccatcctgttaagtcactaggtcaagactggactgttaaaaatggtactgttgttgactatgacatggttgaacgtaattcaaacggtgatttatggtacagaataggaccacaccaatggctgtatggaccacacttatcacttactgaagaagacagctaccgtcaatacagcaactctggttatggttatgttaaagatggcgctgtaaagtatcactttactaaggaccataaaatggtgtctagcaatactactgttattaaaaaaggtagtggcaaacatgcatggcactgggctggtaaaggcaagaaacgccataaagtttacggacatgctaattactgggccgaaaagcaaaagaaagtcaaagttactgctaaaaaagggatgtctactattgataaaacaattactcaaggcggtaagacctacatgcacacgagtcatggctgggtagaatctagttcaattaactacactaaagatggttcagttaaaccacattcctttgatgactttattaataatcaacttaaagatcattccaaggttgaaatttatgcaactcctgacagtaagaatgctttaaactggtcaattcctaatggtgagacattcactgttgttaatggtcatgaagcaaaatctggtgatggcaagacttacattgaagtaacttacaaaggaaaaaatggatggctctgtgaagatgatattgatgacaaaaattcaaatattacatctgcagatgctgatacagataattccgctgatactgacaccaactacaacgcaaatgttgatcaatctaataaggaagtaactgttaagattggtccactttatgctgaaggatttggtgtaaatcctaacattgatagcgttaatactgttgatattagtggttacttcaaacatgatgatcaggatttaagcggtcagcaaagtgatggtagttttgttgctacacaagctgatattgatcaagctactgaaattggtaagaactatctaattgaacacagatatggtcatatgcaagttcaaacatcacttgattatcaagacatgtcagataatgatcaggactttactcaactaagtctttatgactatgtggatgttagttttcctgattatgaaattactgaaaaagctgaagttacagctacaacgtgggactgtttagcccacgtttttttaaatgtaactttaggtgatttgccaactagctatgaacacctacttgttcaagctagtgaagatagaactaatgaaaaaatcacttccacacgtcaagccattgccagatcaaatagttttattggtgctgttcaggaagctatgactttgcaaggtacatcccaaactcaagcatgggagaccttaatggcaaagttaggtaatgctcactataaaactgataaagctggcaagaagaccttagtacttgatgaatcagttaaagattttgctaaccacatgcaggaaatggttactaacatagataactttgataattttctgaagtctggtggtggcggaatgcttgaacctatttccagtgatggctctaccagttggaataacgtcatggcaattagagctaaaaacaatgatggttcttatatggaatttaatggcttaggttttaatttccatgatatttatggcaatccacatgctttgtttggtattgatgattcaagtggtgaagtaactggcaatttctttgttgatcaagctcatatccctattttggatgcatcacacattaagactgatacaattacaagtttgggaactattaacggtgttttacacgttgaaaaccatggcatttcaattgcggttggagatgccactaatttactaaatcctagtcaggaaattggtggtttgagtttagattctccaaattatactttgaatttgggatctggatcagtaaatattcatgataaaaatagtggtgctattacacacattggacctaatcaagcacagattggtggtaggaatgttgttgtaacaagcagtgatcaacctgtattaggttcatggattaagcaatattggcgaggaccaagtaagtattgggatttataaaaatgaatacattagaacaatttgtagcaaatgaattgggaactgttattgcaaaccaatccattaaaatagcgaaactagaaaaagaaaatcaaagtttaaggttaagaaatactcaacttcaagaaattcacagaaagaaggtgaaagagagtgagtctaagaccgataacattaaaaacggataaatcaataacccccgtgtcagacgacacgagggttttacgttctactgaaaaaggtttagtgctggacgtaacaattttaaatgaagatgattctccctatgatttaactgataaggatgtttcattttcagaaatcaaagagagtgatcgtgtagttgctgatgatggtactggtgagcaaagtggtaaattcaacatgattgatcgaactaaaggacactttagttatcaaatgactcaccaatgttatacagccagtggcacttgtttctttcaaattaagcaaggcgacactattgttgatactacacaagatttctattttcaagttaaagttgatccaactgttaagcctatcaatgatagttatgtaagtagtctcattgctatggaaaaccacctgctaggtgctactcaaaaaacacaagctactattgatcaattgaataaagattcaagtaatgcacaacaacaagcacaagcagtacttactaagattaacagtgattttactgattactctattaaatacaataaattatctagtgattggactgctgaagctaaatcaattcaagacgctgcaaatcagcaattagctaatcttaaaaccagtaatcaagctgacataactgcagctgttaagtcaattactgatcaacgtgatgctgctttaaaacagttaaacgatgataagactaaagcacttgctgatttacaggcagactacaacgcatggaagacttccacagttaaagatttcaatgatactgttcagccacttaaagacagcattagtgaaaatgaccaaaaacttactactgtaagtaagcaagtttctgatactgtagtgtcaatggattccttgaaacaacagtttgacaaggtagacttttccaagtttgttacaggggacaccattaaaaattactacactaaggaagaaactgatttaagactacaacaagctggtaaggtaaaatctgtagataatattcaacctgattcaaacggaaatattaatacagaccactacactaaggatcaagcaaatcaaaaacttgccactaagctgtcgtttgtcaagagtgacagccctcaagcggcttatgaagcaagttttaaaccagcagcagatggttcaccagtcattgcaatttatgacatgaatgatgagcctggcgaagctgttattgctggtcaaaaagttacaatcagtactttaaatgacgctattaaggctcttcaaactcaagtgagtggcttaagtggtttgcaaagcgctgtggacggtaaagccgataaagcaacggtatttttaaagactgatgcagacagcttaaagaatcagcttgaatctgaaattagcaacgctggtaagcttaaaactatcactgtaaacggtggcgcaaagataagccctgatgatagtggcaatgctaatatcactgttgatttatcaagcaaggttaaccaaacggatctgaataacactaacaacagagttacagcaattgaaacaggatatatgaaaaagcctaccgtaattagtaaagctgactacgataagcttgctactaaagatccaaatacgttgtatgaaataacagaataaagaaggtgaccgtatggctttaacgataaatggcaaaaaagttctaggttatgctctaggtgaaaatgagtttcttaatggaaatggagcagaaaacctaaatattttttatattggtggtgataataacagtgaatggaaccatcaatcttttactattgatatgacaaaatattttagtcaagctgatgtaaagtattcggatgttcaatattaccaaattattgtaaaggtattttatcaagatgctgacaataatactcttgaaaacaattttcgcacaccgttattgaaacgcggtgaaataaataacaagcgaagtgataatgaaggcagtcccggagctatgtcagtttggtttacggacaacaccacattagctgtccgtacaaaatccgattatgacgacactttaggctattcatatactaatctggtattggcggtgtatggctttacttctcaagatgtaggtgctggtctatagatggcagcacccaatagatattcatcgaagaattaaagctgtcgttcatgataaacgacagcgtacttaagcgatacattcgcttattttttatatcttagaaaggagtttttatatggctaatatttttgcacctggtggtcaagaattggcattagcaaaagacattgttcgacctaatttgcttgctaattctaaaaaatgtgagataagaacaccagcaggaaatatacagtttggcaaattcattaccctaaaccctaataatttaggatcaatatatttaactgatgcagcttcaaataaaggtattcacaaagacgcaactacttatttgccaatagagcaaaacacatattatgctcaaacactatggtttaccacagatgctcaagttattcttagtaattttgcttcaaattacatcttttactcttcaaatggctctcgatatctcttgtcaggcgtagaagcacatcaaattgttggcaatcaatataaagtatctggttattttaattccaagacaaatagcgactttaatcttggctatattggcaatttttctcaatgtttgaaaatcgcatcaactgctcaggttagatttgatgctttaaaagtagaaaaaggtactgaatcaacagactggtgtcctgcctatgatgattatgtaatgcaatctgatttagatgatcttaaaacacaaattgagcaattaaaatcaaaataattgaagcccacgatggctattttttatgcaaaaagcatagttaattaacactgtcgttgatattgaacgacatacttatttaaagaaaggaaaataaaatggcagaattaaatgaaaatacattttggatctctggaattattaatggagaatacagagagtgtgatggtccatataccaccacaaaggatatgagtgataaaggctatccttatgtaactaaaactccaaatccaaactttacacatcaaaagtatgactacacagctcatgaatgggtagacacttcagatgatgctttacttcacactgtggaagatgtaaaagaggctgttactgaattaaaatcaaacagtcagtcaaatactcaatcaaatgatcaacttgataagaaattagataagcttactactttggtcattatgtcaaatgttcaagtaggtgaaattagaaaagaattacaagcggttaaggctcaaaaccagtctgcagctgctactcaacctactgaaccaacacaaaacaccacaccagaagttgaaggaggtaataagtaatgtttgagatttacaagtttgaatttgataacgattttatcagtcaagatgaattaagaagttacattgatatgggcttaattactcaagctgaataccaagaaatcgttggtggtagcaatgaagaagctaaaccagtggaaggctaaattaacaattagaaattgtgaactgctaattggtctttttattttaggtaaaggtgtttggctgtttcatgatagccattatttcatttatcctccacagtttgagaatattgaaaacagcagatacattgactgcttcctaattttgttaggaatcttgttaatgctatctgcatttttagttccgtatattaacaatattaaatacaaaattatgctaattattgctagtaaagtatttcttgtaatagttggtattgtttgtatggttttagcattattgcaattaacgcatggcatctttactccattctatcgaatggggcattcagcatggggagatctgataatctttggatttgtttatctaactgcttgtgatgcctgaaagtgggtgtcatgagtgaattggggatacattattacagcaattggtggtgtgatcagtgcaataactctgttttataaagcatttgatagtagcaagcaacaatcactcaccacactgctacagcaaaaggatgaagaaattaagcagaaagaacaggatgctgaaatctacagaaaaaaatggctagatgccgaaaaagacaatgatgaattaagaaagaagttaaaaaatgacaattagagactggttatatttaggaattacaattgctagttatgtaattgcaattatcgcaggtgtttacgctagaaataaagctaaaattaacaaggcaactacagcaggcaaggcacttgatgtagtaggacaacttgcaacctatgcagttcatgaagcagaacacacaggtatgggaaacgaacagaaacgtgaatttgctagtcaagtgattgtacaaggtttaaattatttaggtattaaaaacgttactgcaaacgtaattaacggtgcgattgaaaaagcagtaaatgctatgcacttagctaacatggaagacagcgatgaaattactgttgctcctgtacctgataatgaaattctgaaacccactgatcaattgactgctcctgaaaatcaaccacagggagatgttaataatggttaggtattttggcgtggatgtagcagcatatcaacccactagcatgtcaaattacattagccatggtgctaaattcgtgattgcaaagttaagtgaaggcttaagttactttaatcctaaggcacatgctcaagttaagagcacacatgctaaccatgcttacttacatgcttatcactttgcgacttttagcaattcggtttcacgtgctaaaaaagaagctaaattctttgtgcaccgtgctgaaattgaaggtattagtaagaaacggtatctatggttagattgggaagttggcgatggtaatgtagttactagatcagttccatcaaatactgctgcaattattgcatttatggacgtttgccacaatgcaggttataaggttggattgtattcaggtgctagtgttttacgtaataacattgatactaaaaaagtgattaagcgttttggtaattgcttatgggtagcttcttatgcaactatgggcagaattgatacacctgactttaattactttccatcaatggaaggcgtagcaatttggcaatttactgataactggcgtggtcttaacgtagatggcaatattagtctaattgatttacattcagaaaagaaaacaaatcagccgactaatcctaagccaattacaaagcctaaagagaaaatacctaaaattgtatttgttcctattattaacaacaatccaaactataaagtaagattgctagatagtaatgggcattatcaagataaatacattcccactaactcaaattggaaagtatgggatgtaaaaacaattaaaaatgtgaaatactataagattggtactgataagcaatgggtaccggctaaattctgcaaagtataaaaaaagaaggaagtgaaaaattcctctctaaatctatcaagaaagccactctggacattgtgtctggggtggcttttttgcgttataatataagtgttgtaaatgttattttgctaagagaaaaacaacgataatgtcagctaaaaccactttgaattaattttcaaggtggtttttgttcacttaataatattttgtgctacaatatagttgttcttttgatagagaaagcgcgaagctttttcgtttttaatccttaagcaagaccacagtgagagctgtggtcttttgtgttataataactgtgttgagtttattaattgtctataaaagcaagaacattaccctgaagatagctgttaaaggctatcttatttttatagaaaggtttaaccatgaaatttgtagtagtaactacactccattatggtgatcataaaatgtatgatgatgctagattaatgaatgcactagatacaatgagctttgagtggattgaagctcaaaaattctggggatcattagtactagatacttataacattgactataaaccagaagacaagatagcagtcattgaattaaaagacattagccaattagcattattagctgaagtagaaaatgataaaatctacattgattatgataagcatgtgattgtacctgcttactatgcagttgatgattaaacgtgtatactatagctactgcagtaattgtctctatagacttctaggtaattactggctatatgaaatttcagattaagcatctaaggtttgtcacttagatgcttttttagtaaaaatgctgttgcacaaatgttgcacaacagcatattagagtaaaaaaagaccttgttagaatattgatctaacaaggttttggttattaggcacgagtaactttaccagactttaaagccttggttgaaacccatacgcgctttggcttaccgtcaacaagaatgcgaactttttgaaggtttggcttccaagcacgacgagttgagttcaatgagtgtgaacgtttgttaccgaatgtagtcttcttacctgttacgtaatcttttgccatttgctaaacctcctttatttgtgatgtcatacttaattagattatcatatgttttcgcgcaattcaatactaaaaggattttttcaggtgtattttaattattgattatgtcgttactatgataaaataataaacgtatatatagataataagacggaggacgaaacatggctgttaagatcaagacaaaagatggtttgattgatatttcaaacggtgtaatcgcaactgttgttggtggcgcagctacgtctaactatggcgttgtaggtatggcatcaaagaatgccattcgcgatggatttgacgggattcttaatcgtgccaattataagcgcggtgttgttgtcaagtcagaagataacgaaattacggttgatgtgtacattattgttggttatggtttgaagatttctgaagtaagtaagaatgttcaagatagtgttaagttcaatttgaagaatcaattaggaatagacactaaggccgttaatgtcattgtacaaagcgttaaggtacttgacgaataacacaagcggaggttttaaatagtggttttaaatgagatagatagtaagcaatttagagatatggtacgtgttgccactcatcgaattggtaaaaatgcggagtttgttaactctttgaatgttttcccagttcctgatggtgatactggtactaatatgaacttaaccattgaaagtggtgctaaggctgtttcggaaaatccaagtactagtgttagtgatttaactgaaagcttggctaaaggtatgctaatgggtgcccgtggtaacagtggggttatcacttcacaattattccgtggcttttacaaggctacccaagggatgaagaccttaactgcacaggaattagcaaatgctttttcaaatggtgttgctactgcttataaggctgtaatgaagccagttgaaggtactattcttactgtagctcgtgttgctgcacaagccggtgctactaaggccaatgacaccgacgatgtaactgaagtaatgaaagctgtagttgaaggtgctaagaaggctcttaagtcaactccagatttattgcctgttttgaagcaagttggtgtagttgactcaggtggtcaaggccttttgtttatctatgaaggctttttggaaggcttaatgggtgaaaactttgcagatcaatatcaacctgacgaaaatgaaatggatgaaatgatcaatgcaatgcaccaccaatcttcagttcaaagccaattggctactcaagatattaaaaatggttactgtactgaaatcatggttgatcttgatgccgatgtgccaaataaaaagaagtttgatttggaagaatttagaaagcacttgtctggcttgggcgattcattattagctgtttctgatggtgaaattgctaaggttcacgttcatactgaacaccctggtgatgttttccaatacggtagtcagtttggtcaattaggcaagatcaagattgataacatgagaatccaacacgaaagcatcgttgaccaagatgaagaacaacaagaagcagttgattttgcagtgatcgcagttgcttcaggtaacggtattcgtaagttatttgaaagcgaaggggtaaaccgtattatctcgggtgggcaaacgatgaacccatcaactcaagactttattgatgcaatcaagaagtctggtgcgaagaaagctattgtcttgccaaacaacggtaatattgttatggctgctaagcaggctgctgaagttagtgatattccggttggtattgtaccaactaagactatttctcagggtttaaccgcgatgctttcattcaatccagatgcatctgttgatgaaaatgtggaagctatgacagaggacttagatacggttgtttcaggtgaagttactcaagctacccgtgatactgaaatcgatgaagtagaaattcataagaatgactacttgggaattgttgatggcaagattaaggttgacaatgctgatttaattaagactactgttgatatgattgaaaagatgctggatgaagattcagaaattatcacaattatgtttggccgtgatgctagtgaagagcaagcacaagaagtagttgaacaacttgaagccaaacatgatgatcttgaatttgaaattcatgatggtggtcaacctgtatatcacttcttagtatcagttgaataacaatgattgataatgcattatttgctcctgtcacagacttaaagggtgtagggacaaagactacagctgcattaggaagcttaggcatctatagtatttatgatttgcttttttactttccttttcgttatgacgaattacaaacattaccgttagatcaaatcatggatggtcaaaaagtaatgctaaagggaatagtagccactgaagcgtttgttagtcgttttggctataagaaaacgcgcttaagtttcaagatgagaattgaccatgatgtgatcatggtcaatttttttaatcagccgtggttaaaaaataaaattgagatcggacaagaagtagctatttatggtaaatacaatgttgcccggcaaagtttaacggcctttaaattcgtagcagccaaagaaaatgatagtggtatggcgccgatttatccggttaatcgacatgttaagcaaaaaaaattagtagatctaattaatgtggctattgacgattttattgatcaagtgcaggatattgttccggaaaagttgcggcaagaatatcgtcttttaaaagaccaagtaattattgaaaaaatgcaccaccctaagaatagtcatgaggctgaactagctaagagaagtgcaatttttcgtgagttttttatttttgaattacaattagctttattgacccgtaatgatggtaaacaaatgggttatgcaaagaaatacgatctgacagaaattgctcaattaactaaatctctgccatttgaattatcagatgatcaaaagcatgtggttaatgaaatctttgctgatatgcattctgatggtcaaatgcggcgacttttgcagggtgatgttggttctggaaaaactgttgtagccgtttatgcgatttttgcagccattacagctggctatcaggcggctttgatggtgccaacagaaattctggcaactcagcatttcaaaaaaatcgatgaattgttgcgtcctttaggtgtgcgagtagctcttttaacaggcaatacaaaaacactggagcggcgtgagatctaccgtgaattaactgatggcacgattaatgtggtaattggcactcatgctttaattcaagatagtgttatctttaaaaaattaggtctagtcattattgatgagcagcaccgttttggtgtaggacaacgacaagctttgattaataaaggcgatcaaccagatattttggcaatgaccgctacgccaatcccgcggacgctggctttgacagtttatggtgatatgacagtctctgaaatacatcatttaccagccggaagaaagccaattatttccacatggaaaacaagtagtcaaatgaaggaagtctatcgacaaatgcaagagcagctaaatcaaggctttcagatttacgctgtgacaccattgattaccgagtcagagacgttagacttaaaaaatgcagaagaattgcatgaaaaattaagccatgattttcctaatcacaaggtagtcctgcttcatggtcaaatgccaggtgcgcaaaaagatgagattatgactgcatttgcagctggtgagatcgatattttagtaactaccagtgtgattgaagttggagttgatgtggctaatgccaatatgatggtgatttataatgctgatcgttttggcttaagtcaattgcaccaactgcgtggtcgaattggtcgaggacaaacacaaagttattgtgtctttctagctgatcctaagaccgattcaggtaaagcaagaatgaaaattattgcgtcgaccaatgacggcttcaaattagctgaagaagatttaaagatgcgcggtgaaggtgatttgtttggtaaggctcagtcaggattgccagaatttcgtgtgggtgatgtagtaaataactacgatacattggtcgttgcgcaaaaagaagcacgagctttggttgcggctgatcctgatttatcagatccaggacataaggcacttaagcaagtgctagaatataagcaattagagcaaaacagaatttagaaaagattgtggtgaatatatgagaacaattgcaattgatgcgatgggtggcgaaaatgccccagatgcaatcgttaaggcggttttacaagctaaaactggaatgcctgagactaaatttttattatttggtgataaagaagcattaagaaaactaatccctgaagatcaaattaatgatcaattaggagttgtacctacaacagaagttattgctgatgaagatgaaccagttaaggcaatcagaaaaaagaaagactcttcaatggttgtggcagctaacttcgttaaggaaggaaaagctgatgcgttgctttccttaggcaatactggtgcattgcttgcttgtggaatttttattattggtcgaatcaaggggattgttcgtccaggtttgatgcctactttacctgttcaaaatagtgacgatggcttcaatatggttgatgttggtgctaatgctaagagtaagccagaatatcttttacaatgggccgaaatggcttcgtactatgctgagaagattcgcggcattaaaaatccgcgagtaatgctcttaaataatggagctgaaagcgacaagggtgatgatgttcaccaaaaggcctatgaattgcttaaagaaagtaatttgaatttcttaggtaatattgaaggtaatgaattgctattaggcaaggcagatgtggtagtaaccgatggctttaccggaaacgctgtacttaagaacattgaaggaacctctagcgtcttgcttcatttattaaaagatagtttattaaatggcggtgtaatgactaagttaggtgccttaatggtgaagggctcgttatcgagcttaaaatctaaatttgatacggctaaatatggcggtgcagttttactaggcgttaatgcaccggtagttaaaacccacggtagatcaaatgaacgtccaatttatttcactcttaagcaagtagataaaatggttaaagaaaaacttgttgcagattttagagacgaattcgctgaaaaatagtacaatgttttattaaaaaggagaagttttatgtcagaagaagaaatttttaataaaattaaagacatgatcgctgataattttgatgttgataaggataagatcactgaagacactaattttatgaacgatttggatgctgattcaattgatttggttgaatttatcttgcagctagaagatgaatttggcgcagaaattcctgatgatgaagctgaaaaaattaaaacaattggtgatgctgtttcatatattaagtctcatcaaggataattttctaaaaaaagccgtgtcgtgatttgcatacgaccggctttgtgtttataattagaaaataaatagaaaagattaaatgcttttaataaaaaagctcgagatggaggaatgacctttggagaagcagagtgatcttttattagatattcaacacctgcatacggcataccgtttgcaagggaaattctatgatgcggcagacgatgttaatctgactctgaagcgcgacgagattttagccatcgttggtgaatctggttgtggtaagagtacaattgcctcaagtatcattggattgtacgaccataaaaatactaaagtaacaggggacattctttacaatgaattaaacctagttggcttgaatgaatcacttttcaataagattcgtggggacaagatcggaatgatcttccaggacccgttagccagcttgaacccattgatgcgtgttggtgaccaagttgctgaaactctttattaccacactgatatggacgaaaaggcacgtcacgcacgtgtcattgaattgtttaatcaagtaggaatgccaaagcctgaagaaatgtacgaaatgtacccacatgagttgtctggtgggcttcgtcagcgtgttgtaattgcgatggcgattgcatgtaagcctgaagttattattgccgatgaaccaacaacagctttggatgttactattcaagctcaaattttggatttgcttgaagatattcaaaaacaatctcactcagggattattttgatcactcacgacttaggtgttgtagcagaaactgctgatgaagttgcagtcatgtatgctggtcaaattgttgaaaaatctgatgtaaagacaatttttgaaaacccacttcatccatatactcgatcattacttaactcaatgcctcaatcagacgatacggatgaagatcttcatgtaattcacggtactgtgccatctttgaagaatatgccacgtactggtgatagatttgctgcaagaattccttggattcctgctagcgcacatgaagaagaacctaaggtgcatgaagttgcgccaggtcactgggtaagatgtacttgctggaagtcattccactttaaaaatgaaaagacggcaagtggggagtagtttatggcaaaagaaattattcaaatcaaagatttaaaggtctattacccaattcgctccggtttttggaacagaattactgattatgttcgtgccgttgatggagttaatttttcaattaatgaaggagaaacttacggtttaattggtgaatcgggttctggtaaatctactactggtaaagcaattgttggggttgaaaaagttactggcggccaaatcatgtataaaggtttggacgtaaccaaagcaagtaaccgcaagaagcttgattacaacaaggatgttcagatgatcttccaggattcaatgtcaagtttgaacccaagaaagagaatcgaagacattattgctgagccaattagaaactttgaaaatttaactacagatcaagaacgtgatcgtgttcaagaattgttggatatcgtagggatgccaagtgatgcaatttataagtatccccacgaattctctggtggccaacgtcaaagaattggtgtcgcacgtgcggttgcaacgaatccaaagttaattgtagctgatgaaccaactagtgcgttggacttgtcagttcaagctcaggttttgaactttatgaagcacatccaacaacaatataatattgcttacttattcatttcccatgacttaggtgtggttaagcatatgtcagaaaacttagcgattatgcaccgtgggcgtttggttgaaataggtactcgtgatgaaatctataagcatccgatgcatatttacacgaaacgtttgctttctgcaattcctcaagttgatgttgaacatcgtgaagaacacaagaaacatcgcgaacaagttgaaaaagaatttgaagaaaatcaaagtaaatggtacgacaaggatggtcgtgtatatccattacaacaagtagcacctaagcactgggtagctttgccaaaagatatggcccacgaagctaaacttgaagaattagaagaaaaggagagtgattaagcatgtggaaaacgattttacggcgtttgttaatcatgatccctcaattgattatcttgagtttgctggtcttccttttggctaaaatgatgcctggtgacccattcagtggatcaattaaccctaacaccgaccctaaacaaattgaagccttaaaacgggctgcaggtctgtttgatccatggtacgtgcaatactttagatgggtgggcaacttgttccatggtgatcttggtacaagttacatccagcacgttcctgtaacttcattgattgccgaccgtgcaaataacaccttctggttatcacttttaactactattttgacttatagtattgctatccctcttggtattacttcaggtcgtcaccaagacgaatggcaagatactagtgttagaatttttaactacatcaccttggctaccccaggattcgtattctacatcttaggtttgtggctcttcggtttcaccttgggttggttcccaatttctggttctgtttcagctagtgcctctggtttctggggcgtacttggcagtagaatctatcacatgattttgccagcaattctgtatgccttgattactactactggtactgttcagtacttaagaactgggattgttgataacaaggttgaagactacgtaagaaccgctcgtagtaagggtgtgcctgaaaatgtcgtcttcaacaagcacattttacgtaactcattattgccaatcgctgccttccttggtaacactattaccggtttgcttagtggttcaatgatcattgaaagtgtctttagttaccctggtatgggtaagttgttccttgactcaattggtcaacgtgactacactactttgactgctttgattttgatctttggtatcttgactctaattggtaacttattgtcagatatcatcatgagtatcattgacccacgtattagaattcaatagggaggagagaaaaaatggctgataagaaagaaaaagctactaaagaagacgcaaagcaaaaggctactctcccaccttctggattcaaggtggctatgcacgaaattgtgcgttcaaagtctgctttaacagctttgattatcattattgtaattttactgttcacttttggtggttcattattcttaaaccgtgctcaagtaactgaaatgaacattgccgattcatattatggttggggtgaagcaggccacctgttaggtactgatgatggtggtcgtgacattctgaagctgctcatcatgggtggacgtaactcaatcatgattggtatttcagttactgtaattactgaaattgttggtttggtagttggtttggtttcaggttactttggtggagcaattgactcagttatcatgagaatagttgactttatccagattttgccacaaatgccaattattattgttttgactactgttattcctaactacaatgccgtaactttggtattcttgattgcgatgtttggttggacggtcacggcacgttacttccgttcgttcgtcctatcgcagcgtggtcgtgactatgttttggcatctaagacttcaggttcatctaactttaagattatgttccgtgaagttttgccaaacattacttcaacgattatcattgacgttgttttgagtattgctggtaacattggtattgaaactagtttgtcattcttgaactatggtttaccaagtactacgccatcacttggtactttgattggttttgccaatgacccagttaacgttattaaccgtccatggttgtggttgcctgctactatcttgcttttggtaatttccttaagtattaactatgttggtcaagctctgcaacgtgctggtgacgcaagacagcgtgaaaactaataaagtaataattaaattaaaacagctctatcgcttagtagagctgttttttgtttatataactaaaatcttatttaaagtaaataaaataaatattaaaaattatttcataaaactattgcatttctaatttatggtggtattatttaatcatcaatttgattcaaataactattgaaaaagaattgtatcctagatgggggaaacaagtatgaaattatcaagagtattgggttcagtaggagtcgtttctgcggcagcgttagctttagttgcttgtggtaagagtagcaataacaatgctggcgcaaaggatgccaagaagtttaaggaaactactccagttaaggcagtcaaaaagggcggcactttatcatatgctgaagaaactgatacaccttttacaggtatttttaacaatgaattatcaacttctgctattgacacagatgtagcacagtttggtaatgaatcattatttgatactgatgacagttacaagattaatagcaagggacctgcaacttttaagttggaccgtaaaactaagactatcactattgaagttaaaaaaggtgttaagtggtcagatggtaagcaggttactgcaaaagatgtagagtatgaatatgaagttatggctaacaagggcacaaagtctcaacgttatactgcttcacttcaaaacattgttggtgtaactgaatatcatgatggcaaagctaagactatttcaggtattgatatgccagatggagcaaatggacgtaaagttgtaattcacttcaaagaaatgaaaccaggtatgcttcaatcaggtaacggttacttccttgaaactgcaagtccataccatcaattaaagaggattccatttaataaactggaatcttctgatgctgttcgtaagaatccattgttctttggcccttacaagattagcaagattgttcgtggtcatgggtacctaacaaatactactggagaggtaagccaaatcttgataaaattactgtttcagtaattaattcaaattctgcttctcaagcaattaagagtcataagtttgatattgcacaagttgttaactcacaatggcaacaagttaagaatactaagaaagtcaactttgtagctaaggttccacttcaatatggttacatgggctttaaggttggtaaatgggaaaatggcaagaacgtcatgaatcctaaggccaagatgaacaataagtcacttcgtcaagctatggcttacgctatgaacatcgatgctgttactaagcgttacactcaaggtctgagcttcagaattccaactttaatcccagaacaatttgggcaatactttgataagaatgttaagggctactcatacaaccttaagaaggcaaaccaattgcttgataaggctggttataagaagaaaggtacttacagagtacaaccaaatggtaagcctttaactattcaccttgcagctatgactggtagttcaactcaagaaccaatcattagaaattacatccaacaatggaagaagattggcttgaacgttaagttgactggtggtcgtttgatcgaattcaactcattctacgataaggttcagaatgattctaaagatgttgatgtatttatggcagcatggtcactttcaagtgaaccatcaccaaatgacctttacaacgagaaggctccattcaactttactcgttttgtaaccaagaagaatagtcaacttcttgaagaaatggactcacaaaaagcatttaatactaaatatagagttgataaattccatgagtggcaaaagacatgaatgatgaagcttatgttgttccaactacaaatgcatacagcatccaagcagttaacagtaagattacaggcttctcacttaagccatcagatgccaactcattatggtacaaggttggttacgctaagtaattcattgatcattagtaaaattaaaactccaaaattctaaacataaacaaattccttattattaaattctaataactaacttaatagaaaagacaggtatcttaatccgagtacctgtctttttcatgctattgttatatttttataagagtgataaactgaataagtcaacttgcttcaagtaatggaggaattttactaatgaaaaaggcaaaactttttgctggtattacactgttatcaggtgtagctcttaccttagctgcctgtggtaagtcagaatctcattctgatgaatcaaagactgcttctaagtttaaggaagctgttcctactaaggctactaagaatggcggtactgttaaggttgctgttgaagctgataccccatttactggtatcttcaacgacgaactttcaacttcagctactgatactgaagttatgcaatatggtgcagaatcactttttggtactgatgatcactatgttttcaatgataaaggtgctgcaacaattaaggttgaccaaaaagctaagaccgtaactgttgaaattaagaagggtgttaagtggtcagatggcaagcaagtaactgccaaggactatgaatacgcttatgaaattattgctaacaaagacactaagtcacaacgttacacttcaagtttagctgatttggaaggcttgcaagaatatcatgaaggtaagtcaaagactatctcaggctttgaaatgccagatggtgaaaacggccgtaaagcagttcttcactttaagacgatgaaacctggtatgaacacttcaggtaatggttacatttgggaagctgctgctccttaccactacttgaaagatgttaaattcaaggatttaatgtcaagtgataagatccgtaagaagccattgttctttggtgcttacaagttgcaaaaggttgttcgtggtcaatcagtaacttgggttcctaacgaatactactacaagggtaagcccaagctttcaaagattactgctacagtaattaaccctaactcagttgctcaaagtattaagtccagaaaatttgacgttactcaagtaatcaactcacaatggaagaacatcaaggatactaagggcgttaactttatcgctaaaattccactacaatactcatacttaggctttaaggttggtaagtgggatgccaagaagggcgaaaacgtaatggacaagaattctaagatgaataacaaggccttacgtcaagctattggttatggtatgaacgttaaccaagtttacaagcgctactcattcggtttatcattcagaattccaactttaattcctaagcaattcggtgattacttcgacaagaacatcaagggttacacttacaatatcaagaagggtaacgaaatcttggacaaggctggctacaagaagaagggtacttaccgtgtacaacctaacggcaagcctttaactattcaccttgcagccatgaccggtagctcaactgccgagccaatcgttcaaaactacatccaacaatggaagaagatgggcttgaacgttaagttaactagtggtcgtttaatcgagttcaactcattctatgacaaggttcaaaacgatgacccatcagtagatatgtttattggtgcatggtcattatcaagtgaaccatcacctaatgacttgtatagcgaaaaggcttcaatgaactactcacgtttcgtaactcatgaaaacaccaagttacttgacgaaatggattcacagaaggccttcaaccacaagtacagagttaaaaaattccatgaatggcaaaagtacatgtttgatgaagcttacgtaattcctatagctaatagttactcaattactgccgttaacaagaagcttactggttactcacttaagccatcggattcaatgggtaatggtttccctaactggtacaatgttgcttacgctaagtaaagcaattatttaaaattacaaaagactgtttctaaattttagaagcggtcttttttctgtgacccgaaaactggtataatttataggtataaaaaggggcatttttatggtaagtacaaagtttttaaaaaaattaaaagacgattataatatcgaatttaacaatgaaaagctattagaagaagcatttacgcattcttcatattcaaatgaacatcccaatgatggaattcgtgattatgaaaaactcgaatttcttggtgatgctgtgctagaattagccgtttcgaattatgtttatcttcattatcctaagttgaatgaaggtgaattaactcgtttgagatctaatattgtccgaactgaaggattttcagaattcgccattgaatgtggttttcaagatgagattcacttgggcaatggtgaagaaaaagctggagcacgacaccgcaaaactttactggaagacgtgtttgaagctttcaatggggcacttttccttgatcaagggatgccagcagttgaacattttttgcatttaacagtttatccattgattgataagggtgaattcgatgattcacgcgactataagacagacttgcaggaagtattgcagcaagatggtcctgtgaatatcgaatacaccgttattagtgaatctcaattaccttcacactttgttgttgaactaaaaattaacggaaaagttgaatcaaaaggtgagggtcacaataagaaagcagctgaacaacaagctgctaagttcgctttacaaaaattagaaaaataaggggatgaaaaagtgccattaacagaattagtgctcgatggttttaaatcattcgctgataagacaactattcattttgatgatggaattaccggaatcgttggtcctaatggttcggggaaaagtaacattactgaagccgtacgttgggtaatgggtgaatccagtgctaagtcactacgtggaacgaatatgaaggatgtcatctttgccggtagtcaatttcgtaagccgctcaataaggcggaagttactttagtttttgataataaaaagcgtgagttggcttttaattcagatcaggtctcaattactagaagaattctgcgatcaggtgacagtgaatttttaattaataatcagcaagtgcggatgcgagatgtgcggacactctttcttgattctggaatttcacctaatagcctagcaattatttctcagggtcgagttgatcagatcttaaattctcgtcctgaacaaagaagagtaatctttgaagaagctgctggtgttttgcattttaaacaacaaaaagaagctgccaaggcgcaaatggagaaaaccaaggataatttaattagaatcaatgacttggttaaagaacttgaaggtcgattggagccgctgcatgagcaaagttcgctggctaaagaatatcaatttcaaaagaagggactagatcagaaattaaaaagtctgttagcttttgaaattgaggatttaaaccggcaaaaagaagaagtccaaaaagcagcagataggaaccgaatcctgttaacaaaactggataatgaagtaaaaggttcgcaaagtgctgtttctgaaaaacgggcagaatatcaaaaaattcaaaatgagcgagagcaaacgcagagtgaattattaaagctaagtgaccaattatcacagatcaatactaacttgcaggtcgcacagcaatcacaacagtttaataattcaactagggtagaaactcaacgtcaagttgaagaattgaaaaatagcttggttaagttaaaggatgaattgtctgaactgcagcggaataaaaagcaacttaagcaggagcaagatgctttacaagagcagcatgatcaattgactggtaaattgcacgatgatccagaagaattgagtaagcgactagaagattgtcgtaacgactatattcaacttttacaagatcaggctacaactaataatcagattgttaatctgaatactgaattaaaacgtagtcaggcagacactacttatcaaaatagtgatgtaagcaagcagctaaccgatgctcggactgaactggaaaagctgagaactgaaggcaagcagctgacagttaagcggcaaaaggaaaaagaaaaatttgcgcaagttaatgatcaaaataatgatttaactaaacagattaatcagattcggcaagccgttaacgcagagcgcagtaaattagagaaagttgaagcgcgacatgaagctttagtaaatattcaaaagcggcatgagggttattactacggtgtacgtaatgttttgaatcatctatctgatttccctggtgtgatcggggctgtgggtgaattgattacatttccagttgagctagaagctgcaatgacgacagctcttggcggtggcgtacaggatttgattactgaaagcagagttagtgctagggatgcaattaatcaattaaagcgtagtcgtagtggacgagctacttttttaccattagatggcttgcgtcaatatactattccacagtcaactatcactactttgcaatcttttagtggctttaagggcgtagcaagtgatttagttgaaagtaaagccgatcaagatattactgctgcgattaattatttgctgggtagtgtgattatcgttgatacgattgatagtgcaatgtcaatttcacgtcgagttaaccgctatcggattgttaccttagatggcgatgtgatttccccaggtggttcgatgactggtggtcaaagaaaccaacgtaataattcaccactgcagacggcaactgaaattaatcagttagagaagcaattacagactttacgacaaaatttggctgaagatcaagaacggttagatgagctagttactcaaggtgaaaaagttgcggctaaattgcaacaactgcgtgatactttgcaggagactaatcaagcgattaatgaagctgctatttctttccaaaatcaagaaaaggaagtaaagcggctaactgatgctaatagtttatataaatctcgagtaaaagaacaacaagatcggattgctgctttaaagaaagaaatcacccaggctaatgatcagcaggaacaattggctaagcaaaatgaagtacaaaagggcaaaatgaatgacttgcaagaaaagattaagaacttcaatagcttaagtcaacgtgtacaagaggaattatcaaagcttgatcctcaaattgcagtttatactaataagttggaaaacttagctagtcaggaaaaagaaaaaaatattcagatcactaataatcagaagcaaactgatagcttagagcagaaattaactgaattaagtcaaaatggtgaattatcagttaaaaagaattctgatttacaaacacaaaaagctgaaattaagcaaaagaatgaaactctgcaaaagaagctgaatgaacttagtgcgcaattaggacaagttgatgcgcagattaatcaacttgaccaagttgccagtcgtaattatgatttacgcaaagatgcagcaattgaacaagaagattactcagtaaagattgcgaagtttaattccgcaattgatcagcgcttgtcaactttgagtgaagagtatgccttaacgtttgaagctgctttagagcaagcagaaggcgaaaatactgaagaaaagcgcaatgaactggctaaaagcgtgaagttgcatcacatgtcaattgaagatattggccaagtaaatcttgattctattcaagaatatgaagatgtgaaaaagcgctatgactttttgaatggtcagcaaaatgacctgttaaaagctcgtgatgaccttgaaaagtcaatgaacgagttagatgaagaagttaagacgcgcttcaagagtacctttaatcaagtagcatctagctttaagagtatttttccagttgtctttggtggcggtaaagctagattggaactcactgagcctaataatttgctagaaactggaattgagattatcgcacagccgcctggcaaaaagcagcaacgtttaagtctgctttctggtggtgaacgcgcgttaaccgcaattactttgttgtttgccatgttgcaggttaatccggtaccattttgtgtacttgatgaagtagaagctgccctggatgatgcaaacgttactcgttttgcgcaatttttgcttaaatacgatatgaaaacccaattcatcgtgatcacgcatagacgagggacgatgcggcaggctgaccaactatatggtgtggttatgcaagaatctggcgtttcgcaagtattgtcggtttcattaaaagaaatgaagaataaaaatgaggtgaaatagttgggtttatttgatcgaataaaaaaatcactctttggtaaaaaagacgaagaggatgaaaacaaaaaagaagaaaaacagactgagcaagaaaatgaagctaagcctgaatcagaagataatgatcaagaatctgaaaaagtagttgatgaagctaaatcgaaaactgaaactactgatgaagaagaacaaacagtagaagcacaagaagactctgaggtagaagctgaatctggtgatgaagaaaaagcagtagatttagattctaaacaacagcctgaagaagttaaagtagaagagactactgagactgaaacagaagaacagctttatgaaaaggggctagaaaagactaacaagggatttggtgcaagacttaacgccttttttgccaagtttagaacagttgatgaagatttcttcgatgatctagaagacttattaattgaatctgacgttggctatgaaactgctgaacaattaactgatgaattgcgtgaagaggctaaattgcaaaatgctaagtcacgtgatgacttgaagcgagtaatcgttgaaaagttggttgacctttatgataaaggcggcaatagcgaagatgagcaattgacgtataatgctgaagctaaacctaacgtttacctatttgttggtgttaatggtgcaggtaaaactactacaatcggtaagttagccaaacgttttaaggatgaaggaaagtcagtaattttagctgcggccgatacctttagagcgggtgccgttgaacagctagttgaatggggaaaacgtgttgacgtacccgtagttactggtaaagaaaaggctgatcctgcttctgttgtttatgatgcaactgaacgggcaatcagggaaaaagctgactatcttttagtcgatactgcgggacgcttacaaaataagaagaatttaatggctgaattggaaaaaattcaaagaacaatcaagaagcttttaccagatcagccaacagaaaccttgcttgtgttagatggttcaaccgggcaaaatgcgcttttgcaagccaaagactttgacaagaccaccaaattaactgggcttgttttaactaagttggacggctcatctaagggtggtgtagttctagctatccgtaacgaaatgaatttgccggttaaattggttggcttaggcgaaagagctgaagacttagctgattttgatgctgcaaattatgcgatcggtcttttccacggcttggtctagtgataaagttagagatgtaaatattgttttataaggagaattttatgaaagaatatagtgcttgtactactatcttagttggtaaaaatgcctcgattgatggcaccactatgattgctcgtaatgatgacacttttcgtccaattaccccacaaaagttcattattgagccagcccgtcatggtgaaaagaaacatattaagtcatggttaaacaagtttgaaatggacttgccagaagatgcgcaacgtgtaccagctgttcctaatgttgactacaagcatcgtggctactacgatgaaagtggaattaaccaagaaaacgttgcaatgtcatgtactgaatcaacttatggtaatgagagaactttagcatttgatccacttgttaaagatggattagatgaagactgcatgcagacttctgttttgccatacattcattcagctcgtgatggtgtacaatatttaggtaagttaattgctaagtacggttcaccagctggtaactcagttttattcagtgataaagatgaaatttggtacatggaaattgttacaggtcaccactgggtagccgagcgcattccagatgattgttacgctgcaactggtaatcgagttgcgattgaacaagttgactttgataatcctgattacttcatgtggagtaaaggtattcaagaatttgttgaagaacaccatttgaacccagatcatgaaggctggaacttccgtcatatttttggtacctatactgaacaagatcgtcactacaacaccaaccgtcaatggtatattcaaaaattgttcaatcccgaaattgaacaaaacccacaagatggcgatattccatttattcgtaaggcagctaagaagatcactaaggaagatattcaatttgctttaggttcacactaccaagataccccgtatgatccatttggtaagggtacggatgaagaaaaacatcgctaccgtccaatcggtttgaaccgtacgcaaaatgctcatattttgcaaattagaagtgatgttccagcagatcgtgcggctattatgtggttatgtatcggtggtccaactttcactccatttgtaccattctttgctaatatgaatgatactgatccttcatataacaatacctcaatggattacaatatgaatgatgcatggtggtattacaagtcatttgcagctatcgttgaaagtcattacccacaatttgttcagcttgatactacttatttaactgaacttaaccgctacttcagaggtcgagttgaagaaattattgctggtgcagaaggtaaatcaggtgatgaattaactgaatatttgactaaggaaaatcaaaagactgttgcccatactcgtaaggaaactgaaaagctttggggtcaaatgatgattgaatcgatcaacatgtccaaacttactttcaatatggatgaaaatctttaataaattcaaaacagctcgaaaaagggctgttttttataatatgtgaaatgaaaggaatatagacaatggcagaaggtactattggctcattttttactaagattaacaatgaagttgaaaaacaaatgaataacgatttaaaaaatttggtattaatgctaatgaattggaaatgcttattgaattaaatcatcatcagcatggcaaaacttttgaaaagttggctaaagaattgcatgtaactaatgacaaggtcaaatctttgacaaaaaaattggctgccaaagatttgtgcaagaaatttgaaaagcaccgtgcagaaactgaccaaactattacagggatgctcagtaaagatgaaactcttggcttggttaatgtactgaaaaagatgcttaagtcgagtgaagacaataagtaatgtaaaatagtagaactccagaagttaattacttttggagtttttttatgcaaaaattattgacaaatctttaatataatattactgtattaagtaaatagaacagtaatattattagtgaaaggataaaaatgtcagaaattttaagagtggatcaagtaactaagacttatggtaaaaaaggtgagaagcaataccaagctttaaaaggaattagctttgccattgaacaaggtgaattcgttggcattatgggtgcttctggttcaggaaagacaactttattgaatatcttgtcgacgttagataagccaactagtggacatgttttagtcaataagcaagacattactgcacttaagaacaatcaaatggcagattttcgcggaaaagaaattggctttatttttcaagatttcaacttgctagataatttgactaatcgcgagaatatagccttgccattatcgcttcaaggagtgaaggcaaaggatattgacggaaaagcaatggcgattgccaaaagattgggaatagaatctatcttggacaaatacccagctgaaatttctggtggtcaaaaacagcgtgttgcttcagctcgagcattggtccataatccggcaattttatatggtgatgaacctacaggagctttagattcacaatcagctacggaattattgaaaacaatggcagacttgaataagaatgatcaagtttcgattctgatggtaacgcatgatccttattcagcttcttacgctcaaagaattttgttcatcaaagatggaaaaatcggcaaagaaattaaaaaagaaaataagaccagagaagaattttatcaagatattattgctgaattaggtagacgttagagggaggtatagacgtgctttggaaattatcactaacagggctaaaaagtcgctttaaagattatgctgttttgttttcggggctaactctagctgctgcaatcttttatatgtttatgaccattgcaattaatccagcttttcttaagggttcaatggccattgccttttcaattacccagatggtctttatttttgggatagcgctattagctattattaccctagtctatattgtttacgcaaatagttttttgcttagtatgcgtaaaaaagattatggtacttatatgatcctaggagcgagaaatagtaaaattggccgtttaatttttacagagacggttgttattggtttactcgctactgcattaggaattttaattggtatcggcttgactcaagttgtttctcagttattaatctctcaactgggtttgcagctgcataaattcttaggcttttatttaccggctattttatggacagttgttttctttgtagttttatttttcttggctgcaatttggaatcggcacaaattggtaagtactagtgtaatcaagcttttgcatgaggatcaaaaaccagttaagttacgtaataaccgaatctggaaagcaactgaagtaattctaggccttgcccttctagccattggctactgggcaatgtgggattaccatcagttgcaaattaaatcggttgaaattggttttgtcactattttggctggttcatattttgtatttgattctgtatttactacagttatcaatgctttacggaaaaataaaaagtttaaatacagtaaactgcattcttttaccttaggtcagctaaaatttaggttaggtgattacaatagagttttaactgttatttccttgctttttgctctagcattaggtgcgatcactgttggattaaactttaataatatgacagagactgctcttcaggcaacatattatgatgctgtgttgtataaaagggatgctaaagttaatcaacaacttaaaaaagttgccgttagaaaacaaacgactttgaattataaggtcaatgggaaaaagaagtttcctgttctatatgttactgaccaagaaattgctaagaaaaaaatcaaattccaatctggtcgaaagaacggcgaccaaatgaattggaagacaaagacgattacagttgcaggtgtaaagaataaaaaacaagagatgaatttccaacttgctagtttaacaccttattctgattatgaggttaaagttgtaactccagctgaatatgtgaagattcctggaaaaaacaaacaagtaaccttgctattaatcaataactttagaagtaattttaataatattgaaaaattgcaaaagatgtcacttgaccagacagttactaaggatgcacaaggagtttatgtttctctgaataattctaaatctgctcaatatcgcttagtagcaagcgttgcgtcaggttttgaatttatgggcttcttcttaggcttagctttcttagctatgttagcttcaaccttaatgtttaaagtgctatcaggagcaaacagtgatcgtcctcgatatgaaatgttgtggaaggtcggatcaagacgtaagttattaaagagctcgattaaagcggagattggtaccttgttcgctttaccggctgtcttgggtgtgattgatgtattatttggactacaatttttcaaagggattttagctaatccatacgataaaatttggattccatttacgatctttttagtattgtatttgctttattacttaattacagtaaaactctatgaaggaattgtattgaaaaaataatggtacgaaaaaagatctgcaaaattgatacattccctgtcaagtagacagtagaattacataaagcttttattcctcagttgattaataatcagctgaggattttttggcttctcttattttcttttcgtgtattttttgccagtatttctcaattcgatgatttggtgcaatagggcaattcttaatattgcctttcatcgcttctttgcgcatttcaccagcagttaaaccgttaaaacgtttctgtggatcttcattaatgtagtaatctattgtcttacaaatagaatcattaagttcatcataactggccacttgaggatgaagaataactcgcatttctttgataatgccttgccagccttccattggaccattatcaatacagcagccaacacgagacattgattgcgtcatgccttggtcttctaattggttttggaaaggtgcgcgagtaaattgaaaaccacgatcactatggaaaagcggatgagcattagggtatgctttaacagcctgcttataggctgcttgaactaaagcagtatcgtttcgtttactaattgcgtagccaacaggatagcgatcatatagatcaaacacagtacatagatatgccttaggcaggttagcagcaacgacttcagtgatatctgtacaccatttttcattaggtctagatgcattaaagtctctttttaacttgttttcggccgttttctcaggcgttgtatgcttgaactttagcttctggtatctaggcttttgtgatctaatgccattgatacacatcaagcggtaaacagttttatgataaaccggcttttcatcagacatctgtcgattaactgccatggtcatcttttccgtcccaaacagactgttgttagacttggttatttcaatgatctttgcttcaatctttttgtctcgttcttcacgcttactcggcttgcgcttaggatcaaagtatttgtaataagctgagcgtgctattttagcccatttgcacattaaatcaatcttccaattgtacttttgatggcagtcatggattaactgatatgtttcttgtttccagcgtctttttattgcggcttgtctgtatcttggttgtccggcaagcacatcctttctaactgatctaatttttttaggaattcgttcttagtttgttcttctttgagctgacgctctaattccttaatttttcgattagccagttctaactcagttagctcttctggcttcttatgtctgcctcgtttatctgttaatcctgtttcaccattagctagatatttgtgtgtccagctgtaaacctgctggtaagaacaatcaaatttgacagctgtttgagtgtaattcttgtcgtgattaagacagtattgaacaatctgaattctttcttgctgggtagtttttcttcttgctttagtcatatagacctccggatggggatcatagtcccgattttctatatgactattatacttggaaacccattctgatactgttccattgcttctaatgccatatttattagctaaagaaggtaacgacattttgccagctaaatattcttgaacaaccttttctttaaatgccttagagtaatgattattgtattgagcattacttagaagggtatcacgattgctttgatattgatgaacccatcttcttacttgcatcgctccacttttacttggcatcttaagccgtttagctatttcaacgctgctcctattaccattcaagtattgttcaactgcccatatcttttgatcgaatgaatatttactttttctggacataaaaaatcccacctccatggataattgaatactttatgtatttcaatcgtccactttagtgggattgtatcaaatgcagatctttttaactgtatttagattaattttatttattttgcttatttaaaattgaatgacgaacaccatagctaaagtaaatgattaagcctaaaataaaccaaataccagcataaaatttagcttggtagtcaagccctaagaagacaattaaagcagccatgaaacctaaagcaggtaaaactggataaaatggcatcttgaatgaaggatcatcaatgtcttttccttcacgtggacgcaacttataaatacctaaagaaacaaacataaaagcaattaaagtaccagctgaaaccaattgtgacaacatggagaaggggaaaaatgctccaagtaaaattgctacgattgttaatgtccataaagcattattaggtcgacgatctgcattcaacttgcccagccatttaggaagcatcccgtcacggccaaatgaatagatcaatcttgaaccggccatactcatcccaatcaaagcagtgaacatccctaaaacagcaatggtttggacaatgatggcaacaattggatgaccagcaaaccgtaaggctaaacccactggttcagcggaattagcatacttctgataaggcataattccaattaaaactaaactaactccgacaaataaagtaacagcaatagcaagtgagcctaaaatgctgcgaggcatagttttttgtggattaattgcctcagctgagttagcggcgattgaatcaaagccaatgtaagataagaaaatcattgaaacaccagcatagattccttgccagccaccgaatggaccgttagcagtcatcttgtatttcggtataaatggggtgaagttaacttttttaattgcaaaaacgccaacggcaataaagagtagaatggctaacacctttaatacaactaaggcattttcaacgcgagctgcccttgaaacaccatgaccaattaataaggcaactaacaagattgaaactaaagaaatgatatcaataataccaccgttattgccaaaggcgttagataatgacgcgggtagtttccaacctaatggtgcgattagagctctaaagttagcagaaagccccgaaccgacgaaagccaaagcaatgaaatattctgctagaagggcccatcctgctacccaaccccagaattctcctaaaactacgttgatccatgaataagctgatcctgcaaatggcattgcagcagccatttctgcataggcaaaagccactaaaccagcagcgattgctgctaaaataaaggaaatcgctactgcagggccggtatgcttagctgcaacttcaccaggtagagtgaaaattgaagcggagacgattgttccaacacctagagctaagaagtcctttacttttaatgagcgcaccaggtgtccatctttattttcatagacgcgtggatcttctttactgttcattctctgccaaagattcacaacgcaacttcctccttatgttaaaatatattcatctaattataattaaaagtacgttaaaaaatcaactattacatatttgaaattccactttttttagaaattgttatctaagataggttaatctagcactagcttatgacctttgttatactaaagactggtgaaaatcaatggatgaactaactaaaaacgaggagctaggcgatttatatgcctactatggctctttattaacccaggggcaacaatcttattttgaagactattactacaatgatttgtctctaggcgaaatagctgctaatcatcaagtatctcgtcaggctgtctatgataatctcaagcgctcaagtaaaattcttcagaactatgaagagaaattgcatatgaagcgcgacaacaatcaggttgaagatgtcttggcagatacgcttttatctttagataatggtgatagtgaagctgctaaaaaagaaataaccaatttattaaatcaattgaggggagaatagcccatggcttttgaaaatttaagtgaaagaattcaaaaagcattaaaaaatttaactggcaaaggtaaggtctcagaagaagatattaataaggctagtcgtgaaattcgacttgctttgttagaagccgacgttaactttaaggtcgttaaggactttattaaaaccattaagaaagaagcccttggcaaggaagttcaggaaagtttaaacccaggtcaacaagtaattaagatcgttaatgaacagttaacgaagatgatgggtgaagaagcagttcctttaaacaagtctaagcatattccaactatcattatgatggttggtttgcagggaactggtaagactacgactgtgggtaaattagcctatcatttgcaaaagaccgaaaaggcccgtccgctgttgatagctggcgatatttatcgtccggctgctgttgatcaattgaaacaaattggtgatcagttaaaagttccagtatatagtgaagacggagaaaaagacgtagctaaaattgttcaagatggacttgcagaggctgaaaagaacaagaatgactatgttttgatcgatacagctggtcgtttagaaatcgatgaacctttaatggaagaattagagcgggtaaagaaagtaacccatcctgataacattcttttagtcgttgatgccatgactggtcaggcggcaacagatgtagccaaaggctttgacgaacgccttgatgttacgggcgtgattttgactaagttagatggtgatactcgtggtggtgcagctctttcaattcgtgcggtaactggtaagccgatcttatttactggtcaaggtgaaaaattaagcgatttagatgttttccatccagatagaatggcatccagaattttaggtatgggtgacatgctttccttaattgaaaaagcccaacaagattatgatgctaaggaagctgaaaaagtcgctgaaaagatgcgggaaaatacttttgacttcaatgattttgttgatcaattgcaacaagttcaaaaaatggggcctcttgaccaaatcatgaagatgattccgggactagctaataatccgcaattaaagaatctaaatgttgatcaaaagcaaattgatcatactgaagcaattgtttattcaatgactcctgaggaacgagaaaatcctgatatgcttaatccaagccgtcgccgaagaatagctgctggttcaggtcgtcctgtagttgaagtcaataggatgattaagcagtttaagcaaatgcgcgacatgatgagtaaaatgtctaaaggaaatatgaagggcttgagcaatttgcctggaatggattcgccaatggctaagatggcaatgcgccgaatgaacaagaatttcaagaaaaataagaagaagcgtttacgcaaggtaaaaagattccattcttaaaaaataaactgttaaggaaaaatactttacacctgttaagtttggtggtatattattaatcgttaagttttaggaggaaattaatttatgtcagttaaaattcgtatgcaccgtgctggtgccaagagaaagccattttacagaatcgttgttgcagactcacgtatgccacgtgatggtcgcttcatcgaacaagttggttactacaacccagtttcacaaccaaaggaattgaagcttgacgaagacaagatctttgaatggttacaaaaaggtgcacaaccttcagacactgttagatcacttctttcaggtgctggcttgatggctaagttgcacgatgcaaaatacaataagtaattttgctattaattaagagcttgatgccgtgtgcttcaagctttttttatacctaaaggagaaaaaatggaatattacgatgttgctcggattttaactacgcacggtttgaatggtgaagttaaagttagtataattactgatttccctgaagatcgttttgctatagggatgcatttggcaatcaaaggtgaaacttctcaagttttaactgtggccaagagtagaccttttaagcaattttggttagttcaatttgcagagattactgatattgatcaagctgaaaaattaaaaggaaaaatactagttgttagtgaagccgaccgcggtgaactacctgaaggcgtttattattataaggacatctttgactgtgatgtcattgatgaagaatccggtaagcgcttgggtaaaatcactgatattgaatcgcctggtgctaatgatatttggctagtccatgaagataatggtaaagagtattggattcctaatattgcatcggtggttaaaaaagtagatgtagctaataaaaaagtctatgttgagttattggagggcttacgcgatgaagattaatgtattgacactttttcctgatatgtttgctcctttgcaagtttcaatgttgggacgtgggcttgaagataaaaaatgggagcttaatttagttaattttcgtaatttcactaccgatgtacatcatcatgttgatgatacgccctatggtggtggcgctgggatggttttgcaaattatgccgattaaaaaagcacttgactcgttaccatccacaggtaaggtaattattactgcaccacaaggtaaaacttttaatgaaaaaatagcgcaaagctgggccaaagaagatgaattaacctttatttgcggacattacgagggctttgatcagcgggtttatgacttggctgacgaaactgtttcaatcggtgattatgttttaactggtggtgaattgccaacaatgagtatgattgatgctacagtaagacttttacctggtattttgggcaatgcagctagtccagttgaagaaagcttttcacatgggttgttagaatatccgcaatatacgcgtccagcagattttgaagggcaaaaggtgccagagatattgactagtggcaatcatcaaaaaattgcacaatggcggcataaagaggctcttagaacaacatatttgcatcgacctgatttgctcaaagaacgagttttaacaactgaagaaaagaaaatgttggcagatattaaagcagagcttgattaagcaagctctacttgatatactattcatcgtggcgtgaccacaatgaataagtttaggggtgttccgctggcgttggtacgttgatgaatgccgaagaaggagaaaagtatattatggatccattaattcaagaattaactaaagaacaacttcgtgacgatattcctgcattccgtgcaggtgacactgttactgttcatgtacgtgttgttgaaggtactcacgaacgtattcagttgttcgaaggcgttgtaatcaagaagaagggtactggcatcggtgctacttacacagttcgtaagattgcttcaggtgttggtgttgaaagaaccttcccagttaacgacccacgtgttgctaaggttgaagttaagcgtcatggtcgtgtacgtcgtgctaagctttactacttacgtgaacgtcacggcaagtcagcaagaattgctgaagcacgtcgttaatcataacgtcaatcataaaaaggtcagttccagtggaactggctttttttctacccaaaagttgtatataaaatgctatgatggagttatggaatgaatgaggtgaaataaatgaagttcaattgcaaatttgcacttgtggcagcaaccgtattgacagtagcacttatattatcttttcccaatatcacgactacggtacaagcaacgacgaagaaagcccaagcagctaagaatacaatccgggtaaataaagcaccaataatttatgatcgtgcaggtaattataattcgaaatatcatcaaaatatcaaagctggtactcgtttaaaatatagtggcaagacttatattattcagcagcgctttgcagctgggattcctgtgccaactagtcgaattattggtggtaagctttactattcgattggtaaaggaggctatgttaaagaaagcgatgtgttaacctggcttggtaacacaaatacggtcaagttacattttcggcacaagaaaaattatatttatgataaaaatggtaaaaaattagttagctataatggtggcaagaattattttactaataaacaaaaacccaaaattgaggtaccatactataattcgcctaagcaattatttaatattggtaagggtggttatattgatgccagccaagtaactactttgaatggcaagggaaccgtgtttttaaataataatgcacctatttatgatgcaacaggcaagcaagtcaagaataaaaatctaaaacaaggcacggttttaaactattatggtaaacctaagaaagcggctgctaatactcaattttattattatcaaaataaaactaagatgactttacctgcaattcaacaaggtgatcatacttattttcagattagtaaaacacaatatatcaatgcggcagacgttgctttagtagatggtaagacgttgtgggataaaggacctgtgagtgtgtctttaataaatgatgcatatgcgtatactgccaaatttaagcaaaataaaaaggtgctttatcgtgctggcgctaaactaacggttgatagaatcaaaatagaaggtaaaaaatcacctcaactttatttacatgttaaaggtaccaaaaactatctttattggagtaatgaaaaagactatggcgcatcaccattagattatcgtcacggttcaactaatttaatattgcagacactgttgcataattagtctgtgtgtaatacttttaaactgatatcataaaggactattatcttaatagaaggtgatagccttttattttaaaaagatcacaatgataaaatggctgtatagtagtaatgatgaaaaaagattgtgaagaaattcaactgtgaaactgctgtgaaactaagataaaaatcacaaaactggcagatatctattactaatcttgatataaaggcatttgttattgtgaagctatttttgtaaaaaataatattaaatgtggaattagcgttagaatcaatagttatccacatttgtaaatgtccccagtaaagtcgagtaaaacaaaaatttaaaagaagatggaaaaatggattatccgaaaaaactgattgacgaagtgaaagaacgatctaaaggcatgcagctagaaggaattaattctgtctcgggtccccaacatcctttattaatgattgtcggtgaagctcctggtcgaaatgaaattgttaataatattccctttagcggggatgcgggtaaggaattggataaatcattgaagcagattggtctgacacgtgatcaggtatatattacatctgctgtgagaagtcgaccttttgcaatcaaaaaggtttttagcaagcgtgaaaataaagaagtaatcaaatatcccaatcgtaagccaaccaaaaaagagattctagctcatgcgcctttcttagattttgaaattgaatatgctcaaccaaaactaattgttgccttgggtaatacgggattagaacgtcttttggggtctggtcataagatttcagctgaacatggtcaagtaattaaaaatacaccaattttacgtttaaatgaaactaaagacggctatatttggtcaaaagaaagatacactattttcccagaatatcatcctgccgctgttttttataatcgcaagctaacagatgatattattaaagattgggataaaatcaagccgtatgtagaaaaggaaaaatctgaaaatgagtaatgaaacttttttgattccaattagacaaaataatgatttatcggatatcgctttaaatgaattacgcatggatctagatgagcatgctttacatcaacgttattacactgatattgcttatttagcaggaaatagtcgtaagtatagtctaaatagtgtacaaaccgttgcgagtcctttgataggtaagaaaattttatttttgggttcttccgttacttttggttttggcgctttgggtgaaagctttgttgattatctttggaagcgtgatggcgttgctgcaattaaagatgcagaaaatggtacgaccttagttgatgaagatacttataagacaaacgattcttatgttgctcgttttagagaagagttgaccgaatcacaacctgatgtttttgtcttacaactttcaactaatgatgcaaatcaaaataaaaaactaggcaaaattactaatcaaaactttgataccaaaaccattacgggagctttggaatatatgatttcaacggctcaagcaaggtggaaatgtccaattttaatttatactaatccttattttgctaacccgttatacaaacagatggttgaacgagtacacgaactggctcaaaagtgtcagctacgacaagtttaaaaattgatatgtaaatatgttacttttatattataaagtatgatataatttcatcacaaggtggtgagattttttgtctagaattatgtatttaaaagaagctgctgcttatcttggtaaagctccattcactcttcaaagttgggaccgggctggtaaattaaaagcacatagaactgctaacaaccggcgcttttactatcaatcagaacttgatcaatatttaggtcttgatcataatgaacctattgataaacgtaaaattatagcttatgcgagggtttcttctaatgggcaaaaggatgatttaaaagatcaagtcgcttttttaaggcaatttttgaatgctagaggcattattgccgatgggtatatttcagatattggttcagggcttaactataagcgtccaaaatggcttaaattgattaaagacattgataaaaaccaaataaaagaaatttatgttacctatgaagaccgcttcatccgctttggctttgatttctttgaaaagttttgctcttggcatgactgtaaaataattgtcttaaataatgaagatacttcacctgataaagaattagtccaagacttaatcagtgtgattcatgtattctcttgcagactatatggcttaagaagatataaaaataaaatcaaaaatgatcctaacttaaaagaataggcctaagttaaaaatcctaaaggaggtgaaaatgatgactaattattaccttaagacacgtgtgtatgagttatttccaagtaaaacaatgaaagcagtgcttgaccgcaactgtgattatcgcagatattgttggaatcaagctttagctttatggaatgatctatattttgctcatcaaatctacgataagattcgttatactacttttacgcctaaagaaaataaaaaaacacaccaaatcaaaattattaaaaaagatgttcacttaaatccaagtccaagctggcgcttggtacgtgataagttagttgaagataaggaagattggcagttcaactattcggctcatttgcttcaattagcagtccaagatttaggcaaagcatggaataacttttttgataaggctcaacctgattggggcaagccgaggtttaaatctaaacgtgaagtaagacagggctttaaaagcgatcaagctaaggtgattaatggagagctagtcttggaaaagcccaaaggcttaaagcaagaatgggaagcaattggcttatctgaaaaaccgttagattatccaactggtgtcatgagtatttatcgtgaaagtggacgctattttgtgtctattccatataagatacctaaaaatgaatttaaagctaaagcaagtacaggtagagttactggtgttgaccttaatgtgggacactttaactacatagctggtgatgaacgaatcttacctcaaaagcttgaatatacttatgagaagattaagcactaccaaagattattagctagaaaacgtaaagtaaacggacgaaaagaaagcactaaaagtaataattacttgaagacgagaaccaagcttcaagtagcttacaagcgtgctactaacaatcaaaacgatttactgcaaaagttcactgcaaagctaactaatgattatgacgccatagttgttgagaatttagatgttaaaaagatgatgatgagccatgtagcttcaaagggtatgcacaggtcaatgtttggcaagtttagacaaatcatagcttataagtgcaaatggtacggcagagagctaattatagccaatagtttgtatccatctactcaaagatgtgctgtttgtggaactgttaaaaaaggtgaagataaaatcactttaaaaggcaacaagaagcatggtactaagcataatgagtttatctgttacaattcaaaatgccctaactataaccaaaaagttgaccgtgacgaaaatgccatgctcaacttaacaatgctagttgagcatccagaattaaataaagcattataaaagaaattgcgggcgaggctacgtccgataaagaagccaaaagagtcagtcaatgcgattactcctaaattggaatatcggaaaactgatgaagacgttggtaagaaaaatgcaaggcactatagaccataatgtatgtaaatcaaacacactgcatacattagcatacatttttcatagcacgttgagattctagatttatacgatcatcctgattttcagcatcaagacgctttgtatatggctgatgaaattcatccaactcgtgcgggttatctaaagaaatggttaccattatttgaagaaaaaataactgaaattttggcataaagaaagacctagataaattatctaggtcaaaattgaaattagtcaatgttattacgatacaagctaactaccttacccaaaattgtaactttaggtaaaatgattggagccattgtatcattttctggctgtaatcggtagtgatccttttctttgtagaaacgcttaactgtagcttcattttcttcagtcattgccaccacgatttcaccattgttggcagatgattgtttgcgtacgattacgctatcaccgtttaaaatgccagcgttaatcatactttcaccgtggactttgagcataaagagttcaccagcatcactttttaagtctggtgggagtggaaagtagtcatcaatatcttcaactgccagaattggttgtcctgcagtaaccacaccgataactggaatttcctttggcttgatacctaactcttttttaccttcacgggtaatttccaaagcacgaggttttgtagcgtcttttactagccagccctttctttcaaggcgagctaaatgaccatggacagtggaagtagaagaaagaccaactgcagaacagatttctctaactgtaggtggaatgctccgtttctcaactgtatcgtaaatatattgcaaaatttctagttgctttttatcgcttgtttttcttggcatttttaattctccgtttgtatttatggtacttaatattataacctaattctaccagataatgtcaatattctcaaacaggcgttcttaagaagttatactttttttatgacataaaatagggtagactaatgagtgttaatgtgaggtggaattattatggataataaagatgcaatgagcaaagaagaagaaaaaaaggtaactgatcgaatcaacgaactttaccataagaaagaaaaggaaggcttaactccagaggaagaagctgaaagaaaagaactacataagaaatttttagctaactttagagctgcctttaagcaagatgttgaaaacatggtcatcttagacaagaatggcaaggaagttacctcagaacgtgccaagcgagcacaaagaagaaaaggacttagaaaagattaattagttctttcaaaaagttagagaactatgataagatataaatgttagttagatggaggatttaatatgaatttaggtttagcaatttttttaattatcattgcgctcttgattggcgctgtagcaggtttttacggtgcaagagcttacatgaagaagtactttaaggaaaatcctcctattagtgaagatatgatcgttgctatgatgtcccaaatgggtcaaaagccttcaaataagaaggtacatcaagtaatgaacatgatgaagcaccaacaaaagtaattaatttaattagttttgttagaaaaggcgaaggatttccttcgtcttttttgtgcacttttaagaatgaggtgaaatatgggaatatttagtaagttagggtggttttttaaggctgagaaaaaacgttatatcataggcattacctttttggcgttaacttctttagctaacttggtaccgccccgtgtattaggcttaatggccgatcaattggatcaaggtcacatctcttggggacaatatggaatgttgatcattgctgtcgtggccgctgcattcacactttatattttgcgctatttttggcgtaaacaaatttggggcggcgcagcagaattagagcgccaaatgcgttcaaagttatttgatcattttatggtgatggatcggactttttatcagcgtcatcgaaccggagatttaatggctcatgctactaatgacgtttctgccattcagaacgttgctggtgatggcgttttaacattggttgattctttagttatgggactttcaacaatgattgccatgatcatttttgttgattggcgtttaactattgtagctttattaccattaccgtttttggcattgggagcttggaaattaggtgatcacttacatgatgcttttgataagtcacaggctgcattctctaagctgaataataaaactcaggaatctgtatctgggattaaggtgctcaaaacttttggtcaagggaaagaagatactgctgcttttgacaagatggtcgatgaaacgatcaatattaataaaaaagtttttgtctgggattccttatttgatccactgggaacaataattatcggtactacgtatgtgatcacgattatttatgggggactattagtaactaacaagattttatcaattggccagttggtttcttttatcgcgtatatttctaacatggtttggccaatgtttgctattggttatttgtttaatattctagagcgtggtagtgcaagttatgaccgtgtagaaaagttacttgatgaaaggcctttgattactgatgcacatgcagatccaaatattacttctcaagatttgcaaggtgaattaaaatatgacattaaatcatttgcatatccagatgagccagatattccagttttaaagcaagtcaatttcactttaaaacctgggcaaactttagggttagttggtcgagttggtgcgggtaaaaccacaattattcaactgcttttgcgagaatttgatcagtatgatggtcaaattactctgaatggaaaagatattagaaatattcaactaaaggtattactcagtcagatctcctacgttcctcaaaataatttcttgttttcaactagtatcggcaaaaatattgctttctcttctgaaaatgtagataaggatgatattgcagctgcagccaagaagagtgatttgcatgatgatgttttgcaaatgcctaaaggctatgaaactttagttggcgaaaatggcttatctctttctggtggtcaaagacagagaatgtcaattgctcgggcattgctaaaagatagtcagattttgattttagatgatgcattgtcagcagttgacgcaaagaccgaaactgagattttgtcatcattaagaaaagagagagctgataaaactacaatgatcgcggctcaccgtttgacttccgtgatggatgctgatttgattttggttctaaaggatggtcaaatcgttgaacgtggtaatcatcaacaactattagctgcagatggatggtatgcggaaatgtggcgtagacaggaattacaagcgaaagtaggtgaagatacagatgaataataacgaagaacagcatgaatctgtttggtctaaggcgataccatttaaagagcaagttgatatttttaagcgtttaatgggctttgttaagcaatttaaatttgaaatgattgttgctttagttggtgcatttattgttagtgtaattaatattcttttgccacgtggcttgcaatatttcttagatcactttctattgcatcaaagcacaacagtgcaggtgattttgtttgcaggttttctttatgctttaggctcaattttaaaggcaataattcagtttacttaccaatatttctttgctttaggatcagaaaaaacgctagagagtgtcagaagggcattgtaccgcaaactgcataagctagggatgcgctattttgatcaaactcctgcgggctcaattgtttctagagttactaatgatacgatgactttgagtaattttttgacggtgctatcaacttttgtgattggtgctttttcggtgattactgcgttagtagcgatgtttactactaatatagttgctgggtggttgattttactctttattccgattttattattagttgtttggctttattcgcaaaaaagctcacgtctttatcgtaattatcgtgagcgtcttagtcgaattaacgctaacttaaatgaatcaattgaaggagtatcggttatccaagaatttaatcaagaaaaacggatgactaataattttgaaggcgaaaatggtggtttaatgaatacacgcttcaacatgatccgagtaaattcattgttattatcgccattgacatcgctgctttattcgttagctttagccatttcattaatgtactttggttttccattacgtgaaacttttgttccagctggtgtagtctatgccttttcacaatacatttcgcaactttttaatcctatttcaactgtgatggatcaaatgacctttttccaagatgggattgttgcaggaaagcggatttttcggattcttgatgatacccaatatgaaccacagcaggatgctcaaaaaggattgacgattactaaaggaaaaattgagtttaaacatgtaagcttttcttatgatggcaagcatgaaattttacatgatatttctttcgtagttaatccaggtgaaactttaggaattgttggtcatactgggtcagggaagagctcgattattaacgtgatgatgcgtttttacgaattcggtcaaggtgaaatcttgattgatgacgttaatattcgtaaatatcctaaagaagaattaagaaaaaaacttggcttggtattgcaagaaccgtttatgttttatggagatatttcatctaacattcgtttgtataataatcaaattactgataatcagattaaagacgccgctaaggcagtccaagcggatcgctttattgaaagaatgccgggtaagtatcatgctaaagtgattgaaggcggagaagaatttagtcagggacaaagacagttaatttctttcgctcgaactttagtcacagatcctaagattttggttttagatgaggcaacagcaaatgttgataccgagactgaaactttgattcagcaaggactaaagcggctgagaaagggtcgaacgacattagctattgctcaccgtctttctacgattgccgatgcggatcaaattattgttttagacaagggacgcataattgaacggggtacgcatgatcaattgcttgcacaaaagggttattactataatttgtataccttgcaaaataatgaaaataaaaactaattgtttttcaggacgtttgtgtagtagcaacgtctttttttgatataatagttaaaaagtattaaataattatgaatatttataaggagcaaaaatgaaaagatattttacagttcgtggtggagctggcgacgtttctaagccagacttaaatgctaagccacaagataacttatacttggctgttaactcagaatggctatctaaagcagaaattcctgctgataagacatctgctggtgtcaattcagagcttgaccaaaaaatcgaagatcgagtaatgaaagactttgcggacattgcggcgggcaaagaaaagatgcctgagattaaagactttgataaggcagttattttgtataagattgcaaaagattttgctaagagggatgcagaaaaagctaatcctattcaaaaggatttacaaaaattaatatccttaaataattttaatgattttaaacaaaaagctgccgatttgtttatgggaccatatgctttaccgtttgtatttgacgtcgatgccgatatgaagaacactgatgtaaacgtactccattttggtggcccaagcacattcttaccagatactacgacgtatcaaactgctgatgctaagcaacttttggatactcttcaagaccaaagtattaacttactgacaatgtccggtattggtaaaagcgaagcacgagtttatgttgaaagcgctttggcctttgatcaaaaattagctaaggtagttaagtcaactgaggaatggtcagattatgccgcaatttataatccagtaacatatgctgactttattaaaaaatttaaatcatttgacatggctgatttcatggattctattttaccggttaagccagatcgaattatcgttatggaaccacgttttctcaatcatgctgaagaattattgaatgaagggaattttgctgagattaaaggatggatgctagttaaatacattaacagcgtagctaaattattgtcacaagattttcgtgaagctgcgtttccttttggtcaagcagttactggtacgccacaattgccatcacaaattaagcaagcttatcgtttggctaatggtgcttttgatgaagtagttggtatcttttatggacaaaaatattttggggcaaaagccaaaaaagatgttgaagacatgatccaacggatgcttaaggtatatgaagaaagaattaatgctaataaatggctttctgctgaaaccaaaaagaaagctgtgattaagttaaaggcgttggttttaaaaattggttacccagacaagatcgaagaaatctttgacttattacaagttgatccgaaaaagagcttgtatgaaaatgaagcggcaatgtcaactgtacgaacgaaatatatgcttaataagttaactaagccagttgaccgttcagtttggctaatgccaggtaatttgaataatgcgtgctatgatccgcaaagaaatgacttaacctttccagctggaattttacaggcaccattttatgacattaatcaatctcgtggtgcaaattatggtggaattggtgcaactattgggcatgaagtatcacatgcatttgataatagtggagcaaaattcgacgaacatggaaatatgaacaattggtggactgacaaagattttgctgagtttaataaacgagttggtcaaatggttgatatttttgatggcttacaatatggtcctgctaagattaatggtaagcaggttgttggtgaaaatattgctgatctagctggccttgcttgtgtagttcaaactggggaaaatgatggggcggatttgaaagatttgtttgagaattatgctcgtagctggatgcagaaacaacgccctgaggcaattaagactgaagttcaaacggatgtccatgcgccacaaccaacgagagtaaacattccggttcaatgtcaaaatgcattctatgatgtatttaacgttaagccaactgatggcatgtggcttgatccagaagaacggattactatttggtaaaattgaataaaaaaatagtcactggatttcaatttctagtgactatttttgatatgtaattatttatcaagcatatatttacgagtcatcggtaaagttttacctgatggtccctttgtcaataggtattggataacgtcgatgttaccagactcgaaactagcagcacaagcattaaggtacatatcccacattctacagaatctttcaccaaatttcttttctacttcaggacgaacggcattaaagttcttatcccaaatttccaaggttctttgataatgacgacgaagagtttccatatcagtaatttgtaggcctgaatcgatgatgtcagtaacaatttctggtaagtagccaccagggaaaatatacttgtttaaccaagcattagtggcaccaccttgttgacgggtaataccatggattaatgcaacaccgtctttgttaaggtacttgtagacatcagcaaagtatttaggtaagttttctttaccaacatgttcaaacattcccactgaagtaatgtaatcccatttttgatcaccaagttcacggtagtcttgtaatctaacttttgcgacatcttgtaagttatcgtcgtagattcgcttttgaactaatttaaattgctcctcacttaaggtaacaccggtgacttttaaaccgtattccttagctgcagtaagcatcagagttccccagccacatccgatatcaagtagggtcttgcctttttgtgggtggagtttgtttaagatatgatgtacttttgcaatttgagcttgttcaagatcatctttattgccatcttcgaagtgggcgcaggaataggtcattgttgggtcaagccacatcttgtagaaatcattaccaatgtcgtagtggctttgaatatcttcttcgctttgcttttccgtgtgtttttgcttaggcataaacttacggaacttagaagcacgcatgaatgaatcagcactttcataagcaccaacaagcaatttttggatattaccatgaatttcgatttttttatccatgaatccttcgcccaaagctagagaagcatttcgagtgatttcactcattggaatcttttcattaaaaacaatttcaatttcaggatcaccattgccataaacttcgctcttaccgtcccagtaggttaccttaacagaaaaggggaaagatttactaagcatcattttgtaaaaagttttttctaacaattgctttttcctccaatatttaaaacctaaaaattattttaacacttatattaaattgcacaggtaaagaaaaatcagtataaagcaatatttgttttatactgatttttacttatttagcaacgtagtggaaatttggatccatttccttatctaatttgttccaagcatcttcaagttgttgaaataaaatttgttcattttcatgggttagtttagttttacgatcaatggtaattggatcaccaaagttaacttctaatggcttgcgcttaagcagtcctttaaaagttaaagggccttggtagacaacaggtaccattggtttttttgacattttggaaattaataaaactccaccttttaattcagctgaatgtcgcgtgcctgaaggaaagataattaatgataactttccttctctaagtcccttaactggaatctttaaggctgatggtccagggttatttcgatcgactgggaaagcgtgagcatgatcaagaataaatcgtaaaaccggatttttgaataattcaattttagccataaacatgaattccattggactagcacctagtgcaaaaagcagtggttcccaccatgtacggtggggggctactaaaatataattgccctgaggcaagcgatccttatgatgaatgtgtagatgaccgtttaacacccaaacgatgaaacggacaatcggacgtataattttgtaaaacattgtctcctcattgattccttcatttgatgtaagctattataaaaatataatgacgagaaaggcaaatatttttatggtagatctgaaagataatgagcgaattgactacatgtatagcgataatcttcgtattattcaagataaaacggcttttagtttttcaatggatacattatttttagcatattgggctaaagacttgatccgtgataaagataaggttgctgatttatgtgcaggaaattgtgcagctacaatctatatggcttattttaatcgtgcccattatgatgcaattgaaattcaaaacgaagtttattctcaagcagttcgttcagtcaagcttaatgagatggaaaatcgtatttcagtttttcaggataatgtgctaaatgcaggacattttttgcggaaagatagttatgatgtagtaacagttaatccaccatattttaaagcacctaagggacatgaagttaatccagatcgtaaaaaagcaattgctcgccatgaacttttgattaatttagagcaaataattgaagtggctagtggcttacttaaaatgaaaggcaaaatgttaatggtacatcggccagagcgcttaggtgagattgcttattattgtatgaagcatgacttaagcatcaaaatggtgcagccatttgtgccacatcgcggtgaagatgctaatttaattattgtagaagccgtcaagcatactggaactgatggaactgttttgaaagatgctgttgaagttcatgaatcaaatggcgacttcactccattagtacagcgaatctcacgagaaactgcagatgacaaagctaaacatgaagcacagggtaaatattacttttatgtcttactgtgtaatgatggcagtttttatggtggttttactaatgatttagaacatcgtttgaaaatgcacaatttaggaaaaggagctaagtatactaaaacacggcgtcctgtacggatgatttatcatgaacagtttgacgataagcgtttagctttgaaacgagaatattggtttaaacatcattcacgtgcttggaaggaaaaatttttgcatgagcataatataaagttttaatccttgcatactgtaatcttttcttgtagaatatttgagtatgctgtgtcagcatatgaaacttaaaacacatcaagagcaatcatcatcgtggtgcccagggtagtggttagatgatgaaatgaacgcttgagaggatataaaaccataggaggaatttaaatatggcagacgttgttacaatgaagcaattgcttgaagctggtgtccactttggtcaccaaactagaagatggaacccaaagatggctccttacattttcactcaaagaaatggtatctacatcattgatttgcaaaagactatcaagatgttagatgatgcttacaactttatgaaggctgttgcccaagacggtggcgttttcttatttgtaggtactaagaagcaagctcaagattcaattgctgaagaagcaactcgtgcaggtcaatactacgtaaaccaacgttggttgggtggtactttgactaactggtcaactatgcaaagccgtattaagagattaaagcaattaaagcaaatgtcagaagatggtacttttgatgttcttccaaagaaggaagttgctctcttaactaaggaaatggacaagcttgaaaaattctttggtggtattgaagatatgccaagaattccagatgtattgttcgtagtagaccctaagaaagaaaagattgctgttcacgaagctaacattttgggtatcccagttgtagctatggttgataccaacactgatccagacccaatcgacgtagttattccatcaaacgatgacgctattcgtgctattcgtttgattgctggtgctatggctgatgctgttgttgaaggtcaacaaggtcaagatgatgaatcagttgaagttgacttcaaggaaaatgcagacggttcagaagaaatcgttagcgctgaagaaaacccagaagactagattttactattagttccgtaggaggatctattaatggcacaaattactgcaaaattagttaaagaattacgtgaacgtactggtgctggcgttatggacgctaagaaggcattagtagaagttgacggtgacatggataaggctgttcaataccttcgtgataaaggtatggctaaggcagctaagaaggctgaccgtgttgcagctgaaggtttaactggcgtttacgttaatggtaatgtggcagctattactgaagttaactcagaaactgactttgtttctcaaaacgacaagtttgttaacttggtaaatgaagctactaagactattgctgaaggtaagccagctgatatggaagcagctaaggaattgaagatggctgatggtactactttagaccaatcattcgttaacgcaactgctacaattggtgaaaagattgttttacgtcgttttgctttagaagaaaagaatgacgaccaagaatttggtgcttaccaacacaatggtggccaaattggtgttatcactgttttagaaggtgcagatgctgcaactgctaagcacttggctatgcacatcgctgctatgagccctaaggttatttcaccagacgaattagatgatcaatttatcactgatcaattagctgtgatgaaccacaagattgaccaagacaatgaaagtcgtgcattggtacataagaaaccattacctcaccttgtttacggttcagctaagcaattaactgatgatgttttggctaaggctaaggaagacatcaaggctgaacttaaagaagaaggtaagccagaaaagatttgggacagaattattcctggtaagatgcaacgctttattgatgataatactcaagttgacaagcaatttgcagtgttatcacaagactacattatggacgatagcaagactgttggcgaatttttgaaggaaaaaggcgctaagttagttgctttccaacgttacgaagttggcgaaggtatcgaaaagaagcaagaagacttcgctgctgaagttcgtgaacaaatgaagtagtcattattacataattatcatagaaaggaggagtacaccgtgtgctccttctttttttgtaaaaattttgtagtgttttaaatgttaaaagacattgcggcattagatatggtagaataattaaagctattagaggaggtcattatgagtcaagttaaatataaacgtgtcattttaaaaatatcaggtgaagctttagcaggtgacaagggtacggggattaatcctactgtaattggtcacttagctaaagaaatcaaatcagttcatgatttaggtgttgaaattggtatcgtctgtggtggcggtaacatgtggcgtggtgaaactggcgctaagttgggtatggaacgtgctcaagcagattacatgggtatgttagcaactatcatgaatggtttagctttgcaagatggtcttgaaaaaataggtgttcctactagaatgcaaacttcaattgaaatgagacagattgcggagccttacattagaagaagagctttgcgtcaccttgaaaagggtcgtgtagtcatttttggtggtggtactggtaatccatacttctcaactgatactactgcagcccttcgtgcagctgaaattggtgctgatgtaattttgatggctaaaaacggtgttgacggtgtttactcagctgatccaaagactgatccttcagcaactaagttctcagaattaactcaacttgatttaatttcaaaagacttgaaggtcatggatagaactgcaagttcactttcaatggatactgaaattccattaattgtctttaacgttaatactccaggcaatatcaagaaggttgtattgggtgaaaatattggtactgttattagaggtgataaataatgaataacgaaactattgaaaaagcaaaaactaaaatgacggattctattaaggtttatcaaaagagattagcttctatccgtgcaggtgttgctaacgctgctcttcttgataatgtccaagtagaatactatggggcaccaactccattgactcaaatgtctagtattaccattcctgaaccacgtgtattgcttattactccatatgatcaaaattcattagatgatattgaacatgcattgttggcttcaaacttaggattaactccggcaaatgatggtaaggtaattagattagtaatccctcaactcactggtgaaagaagagaagaaattgccaaagaagttggaaaatttgcggaagaagctaaaattgctgtgagaaatgttcgccgtgatgccatgaatactttgaaaaaagatgaaaagaatggtgatattactgaagacgaacaacgtaacttagaaaagcaagtacaaaaagtaactgatgatgctgctaagcagattgaccaacttgctgatgaaaagcgtaaggaaattactcaaggttaaagatgagtaataaggataatgaattaaatcatttagccattattatggatggtaatggacgttgggcaaaaaagaggcatagacctcgttttgttggccatcgagagggaatggataatgttgagcggattactttagctgctgataaattaggaattaaagttttgacactttatgctttttctactgagaattgggctcgtcctaaagaagaagtagcttacttaatgaacctccctgttcgcttttttgataaatacatgccaacattgatggaaaataatgttaaggtaaatatcatgggctatttggatgaattgcctgaaaagacttatcgcattgttcaacgtgcaatgtcagagacggccaataatacaggcttaattctgaattttgcttttaactacgggtcaagaagagaaattacgtctgctatgcaggagctcggtggaatgattgaagctggttcactaaaaagcgaagaaattactgaaaaaatgatttcagaccatttgatgactaaaaactttggtccatatcaagatccggatttattaattagaacgtccggtgaacagcgaatttctaatttcttattatggcaattagcatattcagaacttgcctttagcgaaaaaaattggccagattttgatgaaaatgatttaaaaaaatttgtagaagattataagcaccgtaaccggcgctttggtaaagtagacgaatcggatagttaaatatgaaacaacgtacaattacggcaattattgccttatgtctttttattccaattgtgctcgcaggtggcctttggatggattggctgactgtattattcgcagcagttggcattagcgaaatctttttaatgaagaaacaaatcttagtttcttttaattttttgttagccttacttgcaactttaacctggacagttccagactcattctttaaagtatttccttcaaatatcactaaattaggtgtgttttatggaattattatgttgttcttgacctggactgttctttcaaagaataaaaccacttttgatgatgtaggtgtatatattttggctgcactttacattggaataggttttcactatatggcagccattagagcatacccacaaaacggtttagcattgctgggttgtgtttttgttgttgtttggtccactgatatcggtgcctacatgattggacgtaagattggaaaacataaattatggccagttattagtcctaataaaacatgggagggctcgatcggtgcagttgtttgtgccttaatttgtagtgccatctatatggcaattcttggcagcttgggtattaactttggtgtatctgaattaacgatgattattctggcctttttcttatcaattgttggtcaaatgggtgatttagttgaatcagcttacaagcgtttctatggtgtgaaagattccggaaagattttgccgggtcatggtggtatcctggatcgctttgatagtatgctgtttgtattgccagtagtggctacaattttaggtattgttcattaggagaattttttattgaagggtatactaatctttatcgtcgtctttggtatattggtatttgtccatgaatttgggcattttatcgtagccaaaaagtcaggtattttggttagagaattctcaattggaatgggtccaaagctttttcaaattagacgtaaccccaccacttataccattcgttggttaccacttggtgggtatgttcgtttagcaggcgctgacgatgaaagcaagctggatcctggtatgacggttgttttacaattgaatgaacaaaatgaagtagtgagaattgatgcttcagaaagcgaaataccaattgaaggaattcccgttcaagtaacaaaggctgatctagtagacgatttaataattaagggttacgaaaatggcgatgaaaatgatccagtaacttatcacgtagctcatgatgcaactattattgaaaaaaacggaactgaattaattattgcgcctcgagatacacaatttaatcaagctaatgtttggcaaaagttggcaactaattttgctggaccttttatgaacattcttcttgggtttgtagtatttttaatctggacatttacagttccagttccagcaacaactacagttggatcaactcaggctaattcaccagcgcgtgatgcaaaaattgtgactggtgatcagattgtggcaattaatggacaaaagattaataattttgatcaagtgtcacagcagattaatcaaagtaaaggcaaggtcttacactttgaattaaagaaaaatggtcaaattaggaaagttacagttaagccaaaagctcataaaattcaaaaacaaacagtttatcaaattggtattgtagctaagagcaatgagaatgcagttgttaaattaaaacgtggctgggatacagctatttcaactaccggtctgattttcagagccgtaggtaacttatttagccactttagtttgaataaattatcaggtccagttggaatttattctcaaacttcacaagtttcacaaatgggctttacttatgtattagcctttttaggaatgatttcgattaatttgggaattgtcaatttaattccaattcctgggcttgatggtggtaaacttttattgaacttaattgaattagttcgcggtaaaccgatttctgaagaacatgaggcaattgttgaattaattggtttcggcttattattagttttaattattgcagttacaggtaacgatatctatcgctattttattaaataattatattttttactttaggagataagaatgcgtcaatcaaaattttttatgccaactttgaaggaagcaccatcagatgcagtggctgaaagtcataagctgatgattagaggtgggtatattcgtcaagtcacagctggagtttatgcttatcttccattaggctaccgtgttttacgcaaggctgagggaatcattgaacaagaaatggataaaattaatgttccagaaatgattatgcctcatttacttcctgcaactttgtggcaagaaagtggccgttacaagaaatatggtgcagaaatgttcaagttaaaagatcgtcatggacgtgaaagcttgcttggacctacacatgaagaaacttttaccgaaattattgctaagaacttaaagagttacaaacaaatgccacttgctttgtatcaaattcagactaagtttcgtgatgagaatagacctcgttttggccttcttcgtgggcgtgaatttgtaatgcttgatggttacagttttgctgcaactcgtgatcaattggatgaacaatttgatgatcaaaaaaatgcatataagcgtatctttaaacgtgccggtgttactgttcaccctgtaattgctgactcaggtacaatgggaggtaaaaactctactgaatttcaagcccctgctgctatcggtgaggatacaattgctactaatgaaaaaggaacatatgctgccaaccttgaaatggctaagagtattgatactttcaagcaagaaccagaagatgctaagcaattaactaaggtagctacgccaggctgcgatacaattgaaaaattagctaaattcctcgatgtaccagctactagaattgttaaaagtattttatacattgctgatgaccaaaaagttttagtattaatccgtggtgacaagcaaattaatgaggttaagttgggtcatatccttgacgctgatgaggttcatgaagcaaatactgctgatttaaaggaaatcactggtagtgaaaagggtggcgttggtcctgttaatgcagattgggctgataagattattgcagatgaaactgttaagaatctttacaacgttgtagttggtgcaggtgaaaccgattatcaatttgaaaatgctaacttagaccgtgatttcaaggtggatgaatttgctgatattcggactgctaacgaaggtgaaccagatcctgttgatcatttaccgcttaagttcactacttcaattgaagttggtcacattttcaagttgggtacttattacactaagaccatgggtgcagatttcttagatcaaaatggtaaagcaaagcctgtcatcatgggttcatacggtattggcgttactagaatgttatcagcagctgttgaacaacacttaactgaacgtggtgttgcatggccaaaggaaatcgctccatttgcaatacatattgttcaaatgaagatgaataaagaagatcaaactgaattagctgaaaaacttgaaaagaaattcagtgaaaagtatgatgttttatacgatgatcgtaaagagcgtgctggtgttaagtttgctgatgcagatttagtcggtgcaccaattagaattacgattggtaagaaggctgctgatggcattgttgaagttaagcgaccaactgatgacaaagcaaccgaaatgtcaattgatgaattagataagtttgtaaatcaagagttaggataatttttgtggcaaataaaaacgatcttttcttaaaattgctcaaacaggttcaatttcctgatagttttgaagacaatgcgcttctacaaaaagggaaaattgaaaacgtggatgtttacgctaaagaacacaggtgggatatccacgttttttttgatactcccttgatgtatgacacctatgtagcattaagaaaagctgtagaagaaactttttcttcttttgtaaatgtaagattttatgttggaacagctgatggttctgatcaatatttaccagattattggcattatgtagttcaaaattcaaatattttgcaacctgtggctcgtgaatttttggctggccaaaaacctaaaaaagttgatggccgctgggttattccagttgataataatgtgattgatggtttaattgagcagaaggctttagatgatttagctgaagagatgcgtgattatggcttctttaatttgaaatttataactcagctggatcagacaagttctaaaaacaatttagaaagtttgcaggagttgcaacaagagcatgaaaaaagcatgcaggaagtctttgagaagacgccagacaaacctaaaccgcaacaacctaaacagtatccaactagacgtactaattatggtaaacgtaaattagatgaaaatgctccaattacacaaattaaagagctggaagatggcgtacgtaatgtagtaattgagggaaatatttttaatgttgaaactcgtgagcttaaatctggtgcaatcattttttctggcgaaattacggattatagtgattcaattgcatttaagaaatttgtttctaataaagatgaaattgaagagctatctgcaattaaaccaggaacttgggctaaaatgcaggggtcagttgctgatgatcaatatatacatgatgtagtttttaatattagtagcttagagactgtcgagcatgttgggcgaactgaaaaatacgaaggtgagcctaaacgagttgaactacatgttcatactaatatgagtcaggttgacgcaactaatactccgacggactttattaaaactgctaagaagtttggacaaaaggcaattgcgattaccgatcatggtgatgttcaatcattccctgaagcatatagcagtggtaaagcactggacatgaaaatattgtatggtgtagaagctaatatgattgatgatcatgctttactagttttgaatcctgcaccgatgacctataaagaccgcgagtttgtaatttttgacgttgaaactacggggttgtcatctgtttacgacacaattatcgagattggtgcggttaagatgaagaacggagaagtgcttgaacgctttgataagttcattaatccgcaccatcctttaagtgagcaaactattaatttgacttcaattacagatgaaatggttggcgcagccgatgatgaagcagttgtcattaagcaattccaagacttttatggcgatcgaccactgtgtggacataacgttcaatttgatgttgggtttgttaatgcagcattaagacgtgcagggctaaaagaaattactcagccagtagttgatacacttgaagtatcgcgtttactacatccagagcagagtcgccatactttagattcattagctaagaagtataatgtttccttggaacaccatcaccgggcaaatcaggatgctgaagcaactggctatttaatgtttaaattgttagatgcttttaataaaaagtatcatgaaaataatttgaataatttgaatggctatgcagcacatggtgaagtttataaacgagcccgtccttcccatatgacagttttggcaaaggatcaagctggattaaagaatctttacaaattagtatcaattgccagcacgaaggactttttccgtattcctcgtacgccgaagtcagatttggctcgtttgcatgatggtttactttatggttctggttgttggcaaggcgatgtctttatcgcaatgatgcaaaaaggttacgacgaagcaagagaaaaagctaaattttatgattatcttgaagttcaacctccagcaacctattcgcaattaattgctgatggtttgattaaggatgaagatcaattacatgaaattattgaaaatattattaaattagggaaggaattaaataagcctgtagttgcaactagcgatgcccactacgttgaccaaaaggacgctatttatcgtaaaatcttgattgcggctcagagatcaaaccctagtcgaaataagccacagccagatttgcatttctattcaacacaggaaatgctagatgcattttcattcttaggcgaagatgtggctaagaaaattgttattgacaataccaataaaattgctgatgaattgtcagaaattcagccaattaaagatgggttatacccaccacatattgaacatgccgatgaagaaatgaagaagttgacctatgataaggcttatgaattatatggtaagccattaccgaagattgttaaggatcgaatagatttggaattaaattccattatttcgaatggttatgcggttatttacttgatttctcagcgtttagtagctaagtcaaataaagatggctatttggtaggttctcgtggttctgttggctctagtctagtagcaacgatgtcaggaattactgaagttaatccgttagctccacactatcgttgtcctaactgtaagtattcacaattctttgaaaatggggaatatggttctggttttgacttgcctgataaagattgtccaaaatgtggaactccattagttaaagatggacaagatatcccatttgcgactttcttaggatttcacggcgataaggttcctgatatcgatttgaacttctcaggtgactatcaaccagtagcccataattttattcgagtaatgtttggaccagataattcatatcgtgctggaacgattgcgactgttgcggataagactgcttacggttatgctaaacactacgatgaagagcatgatttaaagctaagaaatgcggaattagaccgtttggcagctggtgtccgtggtgtcaaaagaactactggtcaacaccctgcaggaattgttgtagtgcccgatgatatggacatttacgattttacgccggtatcgtatccagccgatgatgtaaatgccgcttggttgattactcactatgacttccactctattcatgataatattttgaagtttgatattctgggacatgatgatccaactatgattcgtcacttgcaggatttgtctgggattgatccattgactattccacccgatgaccctggagtcatgtcattattttctagtcctgatattttaggtgttactccagagcagattcaatcagaaactggaactttgggtgttccagaatttggtacccgttttgttagaggaatgcttgaggagactaagccaacgacattttctgaattattacagatttcaggtttgtcccatgggactgatgtatggctaggaaatgctgaggacttaatcaatcaaggaatttgcaaactgaaaaatgtaattggttgtcgtgacaacatcatgatggacttaattcactggggcgttaagccagaagttgccttttcaacaatggaatccgttcgtcatggtcgtggcatcagcgatgaaaatatggctattttaaagaaaaataagaatattccagattggtatattccttcttgtctgaagatcaagtacatgttccctaaggctcacgctacggcttacattttaatggctctacgaattgcttggtttaaagtatattatcctgaaatctattacacagcttacttttcagttcgtgccgatctatttgatttggttgcaatgagtcatggtaagaatactgttaaggctgcaatgaaggaaattcaggataaaggaaacgatgcatcagctaaggataagagtttgatgaccgtgctagaaatagctaatgaatgtctagaacgagggattaagatcaaaatggttgatattgatcaatctgaagcaactgactttaagatcttagataagcatacaattttagcaccgttcaatgctgttcctggtttgggggataatgcagctaagcagattgtagctgctcgtgcagaaaagaagtttttgtctaaagaagatttagctaagcgcggtaaagtatcacaaacaattatgaattatttcgaagaaaatggtgtcttggaagggatgccagatgaaaatcaattatcacttttctgatagttaaattttacaagatcaggtaaaacatggtatactacgtatgaagttcgaataggtaaattcgagtgagcagtgatgctcactctttttattacggaggaaaatttttgtctaaagttatagattctgttcgtccagttgtcgaaacaattattgatgaacatggtgacatgttggttgatatggaatacgttaaagaaaaagggcaaaattatttacgcatttatgttgatcgccaaccaaacggtattgacattgatgagattgcagctttaagtgaacttgtttccgaaaagctggatgctcttgatcccgatccacttccagatccctatgttttggaattatcatctccaggggcagaacgaccaatcaaaacaaaagctgattgggaaaaagctctgaatgattacattcatgtcggtctttatcaaaagattgagaataaaaaaatgtatgaaggtacactcaagtcttataatgatgacgaagttgtattagaaataaaagataagacaagacgaaaaacattaactgttccccgtaagttaattgcaaatattcgttttgcaattgaattttagaaaggttgatcaaaaacttatgtctaaagaaatgctagaagcgtttgctactttggaaaataccaagggcattaagcaagatgttattgttgatgcaattaaagccgctttggtagctgcatacaaaaagaattataatcaagcacaaaacgttgaagttgattttgatgaaagaaaaggtaacttcaaggtaatggcagttaaaactgttgttgacgaagtgcaagatgaccgtcttgaagttagtttaaaggatgctttaacaattaatcgtgcttatgaagtaggcgacgaaattcgttttgaagtaacacctaaaaattttggtagaattgccgcccaaactgctaagcaagttatcatgcaacgtctacgtgaagccgaaagaaaacatattattgatgaatattcacaatatgaagatgaattggttactggtaccgtggaaagacgcgacaatcgtttcgtttatgtaaagattggtaatgttgaagctgttatgcctcaccgtgatcaaatgccaaatgaggtttacaatccccaagaccagattcgtgtactagtaactcatgttggctccgatagcaagggtgcacaaattacagtctcaagaactgctcctgacatggttaaacgattgtttgaacaagaagttccagaaatttatgatggaaccgttgaaattgtttcaatcgcacgtgaagcaggtgacagaactaagatggctgttaagtcaaatgatcctaacatcgatccggtaggtacctgtgtaggccaaaagggtgctcgtgtacaaaatgtagttaacgaacttggcggtgaaaatattgatatcgttaagtatgaagaagatccatctgactttattgctaatgcattaaatccagcagaagtgattgcggttcaatttggtgatgatgaagaagaaaaaagtgctttagttatcgtaccagattaccagttatcacttgcaattggtaagaaaggtcagaacgttcgcttagctgctcgtttgacaagctataagattgatattcgtcctgaatctgaagtagaatttgtagatgaaaaaacaaatgatacagctgatgctgcagatagtagcgaaacttctgaaaatgttgaaagtacagatgacgctgctgacgttgaaagctcagatgatacaactactgtagaagattcaagtaaagaagataaaactgaagaataggtgattttttgaaaaaaagaaaaatcccaatgcggaaggatttattaaccgatacaatgcagcccaagaaggaattagtacgtattgttatcgataaagaaaaaaatgtgtcagttgatccaacaggtaaaaaggctggtcgcggcgcatatgtttcccttgatccaagtaagattgaagctgctaaagagaagaatgtattagaacgtagtttaggtgcgaaagttccagatactttttacgatgagctttactcttatgttgatcatcaaaaggcaagaaaagaattatttggtgataaataagattgcaaaatagacaaaaagcaattaatttgttaggtttagctgagcgtgctggtaagttaactaccggtacagagacagtcattaatgaacttaataagcacaaaatcaaagcggttattatggctagtgatgttcaagacaacacggcagaaaaagtaaaccgcgctgccagaaaagacaatattcctatgataactatgtttactgccattgaattgtcaaaggcaattggcaaaaaacgcaaagttttaggattaactgatgctggttttgctaaggcgttagttaaaaaaataaatgaaggagtgtgattggatggcaaagaaaagaatttatgaaatcgcaaaagaagtcggcgttgataacaaagttgtagtccaaaaagcaaaggatttaggcttagatgtaaagaatcacatgtcatcagtagatgattcacaggttgcaaagttaaagaatagtttccaaaactccgctcctgctgcaaaatcttctaataaaaagaataaaataaaaatctctgtttcttctattcgcaaaaatgaaaagaagcaagaagataataatagttctaagaattctaagagacgcaataataaacgtcgttcaaataatcacggtcatgagaataaaaatgatcgtagaaataatacaggtaagccaaaggcagctgctttgttacaacaatttaaacaaaagcaacgggcagaagaagggcaacttaatcgtgaagcccaaaaagccagaaaagaatatcatgagcaattaagacatccaaaacaagaacagccagtgaaagataataagaaaacaagcaaccacaaagataacaagaagaaagcagaaccagtagaaaagaaagttattggtcctaagattttaaagccttctccagctcgtttgaagaagcaacagcctgaagcgactaaagaactagttcaagttactattcctgaggctcctaaggaagaaaaacgcggcaataatcgtggtcgcaacatgggaaagccaggacgcaagggtaaaaatcaatttggcaatggtcgtagtgaccattcagatcgttcagagagaaagcggcgtaagaataaaaaacgtcaacaagagcaaaagccaaagaaaacacttactaagcgtaaggaacgtccattaccagaaacattagtttacgaagaaggtatgaacgctcaagatattggtaagttaattcaccgtgaaccagctgaaattgttaagaaactcttcatgcttggcgtgatgactaaccaaaaccaatctttggataaagatacaattgaacttttagctgctgaatatggtatcaatgctgagcaaaaagttcatgaagacatctctgatattgataatatctatgacaagagaatggaagagtcaaaggaatctaaaaaccaggttaaacgcccaccagttgttacaatcatgggacacgttgaccatggtaagaccactttacttgatcgtcttcgtcatactcatgtttcagctcatgaagctggtggtattactcaaaagattggtgcttaccaagttagattagatgatcgcttaattacattcttggatacaccaggacacgcagcattttctaacatgcgtgcacgtggtgctgaaattactgatattgttgtactggttgttgctgcagatgatggtgtaatgccacaaactgtagaagcaattgaccatgcaaagagtgctaatgttccaataattgtagcaattaacaagatggataagccaggtgcaaatccacaacacgtaactgaggaattaatgaaatacaatttgattcctgaagattacggtggtgatactatcttcgttaatatttcagctaagacaggtcaaaatgttgatgacttattacaaatgatcttgttgcaatctgatgtgatggaacttaaggctaatccaactgaaatggcaattggtactgtgattgaagctcgtttgtcacgtggtcgtggacctgtagcagacgttttaatccaacaaggtacacttaatgttggtgacccgattgttgttggtaacacttttggtcgtgttcgtactatgactaatgatcgtggacgtcaagttaagaaggctacaccatcagaacctgttgaaattactggtttgaacgatgtgcctgaatctgctgataagttagttgaatttaaggatgaaaagaccgctagaagtgttggtgaagctagagcacaacaagctttacaaaagtctcgtgaaaatgttcaacacgtaactcttgataacctcttcgatactatgaagaaggaaaacatgaaggaagttgacattgtcttgaaggctgatgttcaaggttctgtagaagctttacaacaatcgcttgaaaagattgaagttgaaggcgtacgtgtaaatatcattcactcaggtgtaggtgccattaatgaatcagatgtaactttggctggtgcatcaaatgcatttattattgggttcaacgttcgtcaaactgctactgctaagagccaagctgaaaccgatggcgtagatattcgtctttacagcattatttacaaggctattgatgatgttactgctgccatgaagggtatgcttgaaccaacttatgaagaaaaggttatcggtaatcttactgttcgtgaaacttggaaggtttctaaggttggtacaattgctggttccttcgttgataagggcttggttaagaatgattctaagattagagttattcgtgatggtatcgttaagtatgatggtgaaattgcttcacttaagagatttaaagatgatgttaaggaagttaagcaaggtaacgattgtggtttaacgattaaggactacaacgacattaaagttggcgacgaattcgaagtttacgaaatgcaacaagttgagcctaagtaattactattaggaggaaaacatgaagcatagaattggtcgtgttgaaggtgaaattctacgcgaattaaccaagattttacaaaagaatattcgtgatccgcgcttaagtggtgtaactattaccgcagttgaatgtacgaatgatctttcatatgcaactgtttattacagcctgctaactgaagatgagcataaggaagaagaggttcaggcaggttttgaaaaggcaaaaggcatgatgcgtcatttgcttggtcaaacattaactgtttataaggttcctgaattaatttttaaacgtgataattcagttttgtatggtagtaagattgaccgtttgattgcagaagttaagaaacaagatgctaagcgggaaagcaaataaaaaagagggcgccgtgatggtgccctttttttgttgaaaagaatagggaataattatgttaaacggaattttagttattgataaagataaagggatgactagtgcagatgtagtttatcatttgcgccgcgtattacatattagaaaaataggacatgctggtacgcttgatcctgaggtgacaggcgttttaccaattgctattggtcaggctactaaattaattgaaatgatgcatactaggccaaaagaatatattggcacgggactatttggttatagcacagatagttatgatgcaactggaactgttttaaaagaaaaaaagttgattcagcctttttctggtgcagaaattcaagaaaatatgaataaatttgtaggagaaattgttcaagtgcctccaatttattctgctgttaaagtgaatggtaaacatctttatgaatatgcacgtgaagagattgaagtcgagcgacctcagagaaaggttgaagtcaaacaatatgatctaactaaagaaccagtttttgatataaatactgggcaagaaagctttgattttaagattaaatgcagcaaaggcacttatgttagatcgttagttaatgatctaggtgaaaaattagattgccccgcaacgatgacttatttgagaagaacagctagttctggctttgatattacacaagcagtaaaattaaaggagattgaagagaatccgaaaaaggccactgaacttatacagccgattgatgcattttttaaggaatacactcaggttgatttaactgaagaaaagtggcttaaagttaaaaatggagcgggtatttcgcttgaaactaatgcgaaaaaagttgcactacgatacaataaaaaggtgaaagcaatttatgaaaaaaaaggaaagctttatcgcccaagcttaatgctgttgcaaaatgaataaatgaaatgaaggaattagctgtgaaaatcgttcatttaacatatcctgttaaggaaaatattttatctactagaattgtgcttgcccttggcttttttgatggggttcatttgggacatcagcgcttaattaatcaggctaaagaaattgcattacagaagaaattgtcattagttgtgttgacctttgatcgacatcctaaggaagtttatgagtcgaaacgagattttaaatacttagaaactttggaagaaaaagctaacaaaatggcggaattaggagtagattatttggctgttttaccatttactaaaaatttcagtcaaatttctgcacaagaatttgtcgataatgtaattgtcagattaaatgctgataccgttgttgctggctttgattacacttatggttctaagaatattgcaaatatggctaatttaccccaattttccaaagggcgttttaatattgtagtgatgccaaagcaaacttttaacggtagaaaaattggctcaactgaaattcgtcaagcaattaaggatggtcagatgaaattagccactgaattaatggggcaccattatgtaatgagtggtatcattgggcatggtaaacgaaatggtcataagctaggctatccaacagctaatttgatttgggcagaacataaggtgattcctaaaattggagtttatgctaccaagactaaagtaaatggtaagtggtataactccatgactagcgttggctataatgtaaccattaatcaggacaagaagatatatattgaatctaatatttttgattttaatgaagatgtctatggtaagccaatgaagatcaaatggtataaatataccagaggtgagaaaaaatttgccggattacctgaactgaaagagcaacttgaacgagatgagcaagaaattagggcttattttaagcaaaagggttaagaagctacgtactttgaaaaaagtgcgtattttttgaataaaattagcaatctacttgatttagtgctaatttctggtatcatattaactgttagcacctgagagatgtgagtgctaaaagtgagggcgatataatatgttgaccgagcgtcaagagcttattttaaaaacaataattacagactttacacaaagtcatgagccagtaggctcaaagaccgtaatgaagcagttgccaattaaagtttcaagtgcaacgattagaaatgaaatggccgtgttggaagagcaggggttaattgaaaaaactcactcttcaagtggtcgaattccttcaagcgagggctatcgttattatcttgataatttagttgagccgttgcaattaccagagtctgtttataatacaataggaagccaattagatcgaccttttcatcaagtaaatgaaattgtacaagaagctgcacgaattctgtcagatttaactaactataccgcatttgcggaaggacctgagagtcatgatgttagagtcacaggatttagaattgtaccgctgtctcaacgacagattatggcaattttggttacaagtgatggtaacattcaaaatcaggtatatgctttgccacataatattcacggcgaagaaattgaaaaggctgtccgcatgattaatgatcagttagtcggaaagagcctaaatgaaatcaacgtttcgttgctaagtgaattagctaaaaacgaattaggcggcgaacatgtgactgaattgcttagtttagttgaagatgtcgtaaaagatgcagctagtgagcagatgtatgtggatggacagattaatttgctcaataatacttctgaacatgatgtaaatgacattcgttctttgtacgagttgattgatcataataatctgttcactaatttaatggatgcaaaggtggatccaaagtctggaaattatccagtaaaggttaagttgggatctgaattacccaatgatttattaaaaaattatagtttgctgacagctgagtacagcgttggctcccatggtaaaggaactattgctttacttgggccaacgaatatgccatattcacaaatgattgggttgcttgaatattttagaaatgaactagctaaaaagttgcttgattattatggcaagtttcaataaaggaggttagccgtgagtaaagaagaatttccaagtgaaaaaaatctagagcaaaaagaaaagacttctgagcctaaggctaaaaaagaagccgataaaggtgaagaaaagaagcaagaaaaaaataaacaagatcaaaaattagctaaagaattagctgatttaaaagataagaacaaggatcttgaagataagtatttgcgtagtgaagcagaaattcaaaatatgcaaaatcgctacactaaagaacgtgctcaattaattaagtacgaatctcaaagcttagcgaaggacattttgccagcaatggacaatttggaaagagccctaagcgttgaggccgatgatgatgtgtctaagcagttaaagaagggcgtgcaaatgaccttggatgcacttgtgaaggcaatgaaagatcacggtgtagttgagattgaggctgatggcgttaaatttgatccgacattacatcaagctgttcaaacagtagcagctgagaatgatgatcaaaaagatcacgttgttcaggttttacaaaaaggatatcaatataaggatagaacactaagaccagcaatggttgtagttgctcaataagagaggaagctaatatatgtcaaaagttattgggattgatcttgggactactaactcagcagttgcagttcttgaaggtaaagaaccaaagattatcactaatccagaaggtaaccggactactccttcagtagttgcatttaaagatggtgaagttcaagtcggtgaggtagcaaagcgtcaagctattaccaaccctaataccattgtttcaattaagcgtcacatgggtgaagctgattataaggttaaagttggtgataaggaatatacaccacaagaaatttcagcatttattttacaatatattaagaaattctcagaagattacttgggtgaagaagttaaggatgctgttattactgttcctgcttacttcaatgatgctcaacgccaagctactaaggacgctggtaagattgctggtttgaatgtgcaaagaattattaacgaaccaactgcttcagcattagccttcggtttaaataaagaccaagatgaaaaagtcttagtatacgaccttggtggtggtacttttgatgtttctgtattgcaattaggtgatggtgtcttccaagtattgtcaactaatggtgatactcatcttggtggtgatgactttgatcaccgtatcatggattggttaattaagaactttaaggatgaaaatggtgttgatttgtcgaaggacaagatggcaatgcaacgcttaaaggatgctgcagaaaaagcaaagaaggacttgtcaggtgtatcaagtactcacatctcacttccattcatttctgctagcgaagctggtccattacaccttgaagcagatttaactcgtgctaagtttgatgaattaactgctgacttggtagaaaagactaaggtaccatttgacaatgcattgaaggatgcaggtcttactgttaatgacattgacaaggttattttaaatggtggttctactcgtattccagctgttcaaaaggcagttaaggaatgggctggtaaggaacctgaccattcaattaaccctgatgaagctgtagctatgggtgcagcaattcaaggtggtgttatctcaggtgatgttaaggatattgttttacttgatgttaccccattgtcacttggtattgagaccatgggtggtgtcttcactaagttaatcgacagaaacactactattccaacttcaaagagtcaaatcttctcaactgcagcagataatcaaccagctgtagatgttcacgtattgcaaggtgaacgtccaatggctgcagacgacaagactcttggctgctttgagttaactgatattccaccagcaccacgtggtgttcctcaaattcaagttaccttcgatatcgataagaacggtattgtaaatgtatctgctaaggatatgggtactggcaaggaacaaaagattactattaagagttcatccggtttatcagatgaagaaattaaacgtatgcaaaaggatgctgaagaacacgctgatgaagataagaagcgtaaggaagaagcagaccttagaaacgaagtagatcaattaatctttactacagataagactttgaaagatactaaggataagctctctgatagcgatcgtaagccagttgaagatgctcttgaagctttgaagaaagcccaaaaggacaacaacttggatgaaatgaaagaaaagaaagatgctttatccaaggctgctcaagacttagctgttaagttgtatcaacaaaatggtggtgctgctggtcaagctggtccacaagcaggtcctcaaggcccacaaggtggtaattcaaataatggcaacaacggtaatgcccaagatggtgaattccacaaagtagatccaaataagtaatgggtttataattaaacaaaaggagaaaagaactacccattgagtagttcttttcttttgagaatacaaggagttcaaatagatggcacaagaagattactataaagtacttggcgtagatcgtgacgccagtgatcaggaaataagtagggcatatcgtaaattagccaaaaaatatcacccagatttaaaccatgaacctggagctgaagaaaagtataagcaggttaacgaagcctatgaggttttgcatgataagcaaaaacgtgcgcaatatgatcaatttggttctgctggtgtaaatggtcaaggtggctttggtggtggagctggtcaaggctttggcggtgccggatttgatacttctggctttggtgattttggcgatatctttggcgatatttttggtcaaggccgtcaacagagggttgatccaactgcaccacaacgtggccaagatttggattatcaattgacaattgattttatggatgccattaagggcaaaaagacccaggtcagctatactcgaagcgaaacttgtgaaacttgtggcggtaatggttgtgaaaaaggtacacatccaattacctgtgataaatgtcatggaactggttatatgacaattactcaacaatcaatgttgggcatgatccgtcgtcaaaccacttgtgacaaatgtcatggtcgtggtgtgattattgagcatccatgtaaaacctgtggcggtaaaggaacagttgaccgtaagaatactattgaagtggatattccagcgggaatcgacaatggtcaacaacttagatatcaaggccaaggcgaagcaggtataaatggcggaccatatggtgatttatatattaactatcgaattaaaccatctaaagattttgagcgtcgtggccagactatttatacagaagtaccaatctcatttgctcaggctactttaggagatgaaattaacgttaagactgtgcatggtgatgtaaagctaactattccagctggtacgcaacctaataagaagtttactttgcgtggacagggtgtgccatatcttcgtggtaatggcaatggtgatcaaattactacagttaatattgttattccaaagcacattaatgataagcaaaagaaagatttgaccaactttgttcatgatggtggtggcaatattacaccacaagaaaaaggattttttgaacgcttaaaagataagtttaatatgtaaatgctaaaaaggtttctgctacttgcaacagaaaccttttttaagatcaattaattttttggtgatttttagagtttttcttggaaaatattcaatgctgaattttcaattattattctaaaaactctgcattttattgaaaatttactatgctacaatttcatcatttattctagctttgctataattaatacatagtaaagggtgaacgattttatggatttaaaaaaattaaaagactatcaaaaacacattcgaaattttgctattgtggcgcatattgaccatggtaaatcgactattgctgacagaatcttagaattaactgatacagttagtcaacgtcagcttaaaaatcagatgttagatgatatgccacttgaacgtcaacgtggtattaccattaaaatgaactcagttgaagtgaaatatcatgctgaagacggtgaagactacattttccacttaatcgatacaccaggacacgttgacttttcatatgaggtatcacgttctctagctgcctgtgaaggtgctttaatggtggttgatgcttctcaaggtgtacaggctcaaactttggctaatacttatttggcaattgatgatgatttggcaatcttgccagtaattaacaagattgacttaccatctgccgatgttcctaagactaaggaagaaattgaagaaatgttaggttgggatgcttcagaagctgccgaagtttcaggtaaaaccggtcaaggtattaaggacatgctggaaaaggtagttaaagatattccagctccgtctggtgatattactgctccattaaaagcattgattttcgactctaaatatgatgattatcgcggagtggtaatgtctgtcaaaattgaagatggatctattaaaccaggcgatcgaattcaaattatgaatactggcaaggaatatgaagtcacagaggttggtgtttctagtcctcatccaattaagaaggatattttaatcgcaggggatgtaggatatattactgctaacattaagtccgttcgagaaacacgtgttggtgacacaattactcaagctgataacccaacggctgaaccacttccaggctatcgtcaaattccaccgatggtttattctgggatgtacccagttgacaaccgtgattatgaagatttgaaggaagctttacaaaaactacagctgaatgatgcagctttagaatttgagcctgaaacttcaacagctttaggctttgggtttcgttgtggcttcttaggcttacttcatatggatgttgtacaggaaagattagagcaagaatttgaccttgatctaatcatgacagcaccatctgttgattatcatgcaattatgaatgatggaacaaccaaggtgattgataatccatctgatttgccagatgctggtgaatataaggaagttcaagaaccttatgtaaaagcggaaattatggtgccaaatgattttgttggtccagtaatggagctttgtcaacgtaagcgtggtgaattcgttaccatggattacttggataagtaccgagttaatgtaatttacaacatgccattagctgaaattatttttgatttctttgatgatttgaaatcttcgactaaaggttatgcttcacttgattatgaaattacgggttatcgtgctactgatttggttaagatcgacattttgcttaacaaggagccaattgatgcattgagttttattgctcacagatcagaagctcaagatcgtgcccgtcaaatgacttcaatgctaaaaaaactaattccacggcaaaactttgaagttgatattcagggcgcaattggagctaaaattatttctcgagctacaattaagccataccgaaaagatgttacctggaaaatccatactggtgatccagatcgtcgggctaagctgcttgaaaaacagaaacgtggtaagaagcgaatgaaagcagttggtagagttgaagtacctcaagatgctttcatggcagtcttgaagatgaacgatgatgacatcaaaggtaaataagatttgctagcattcccaacctgacgcggtttgtcgtcactctgagaatgctttttttgcttttctactgaaaatctactgaataaatatctttaaaagttcaaattatcaattgatcctttaatatctttcttttgttttttagttacgtgtgtgtaaatttccatagcagtcttagaagttttgtgcccgagaacgtactgaacatcttttggagtaattctttcattaccgtcataaagtagtgtagcaagagtatgacgcagcccgtgaggggttatcttacgtaaaggctcttttttatcgttgggatgttccttattccatttttcgcattgctttttgtcaaacttatacaagtacttcaaccaaaagtcaggctgctgtgcccaattgtagctaccgtctttggtgtgaaaaatccattcacagtggtcaccgatttcatcgcaatattcgcggtattctttcagaatcatataaagattgtctgacatagggactgcatggtgaactccatttttaacgtcatcaatggtctttttgccgttatcatctttggcgacagttcgctcaatttttacaactcgtttgtcaaagtctacatctgaccatttgagtgcaagagcttcaccacgacggcatccaagagatgcaactgtgagaaaataagtatatttcatgcggctataatcacgggctatatcaagaaaatgtttgagttcgtccaattcgtagaaattacgtgaattatctcgactagattttgctgactttttgggcatgattacgaagtcaaaagggtctttactgcaccagtgacggaagatagcatatttgataattctgtgtaactgattgacaattgacttgtaagttacatattttgaagcaagatcattaacatatttttgtacatgatccggtgatatcctgtctatgtaagtatcaccaaattctggctcagtatgatttttccatgtgtcctttaagcgtcctagtgtggaaccacgcacatcttgcttcattacttcaagccatacattatatacatagcttacagttatcttcttttgagctgtttctatcttttgacttaatgcacttggtccttgtgcctttaaattgcgacgaagttcctcggcttctttgcgggatttgagtttgcttctggtaacgtttataactttaccagtttcaggattaataccgatgtaagtcctaagtcgaaaatactttttcccgttttttaatttatactctgtaatttcagggtcttttttacgagccataatatcattcctttctaaaaatatttgatgatgcgcgctcggcacgagcgcgcatggggcgcccgcgggttagattatctcttgttgatttcatgaatcaaaagaagtaatattattaatgtcaagtttaattcgttcatgtttttcacctccaaggtggagaacaacacaagcttgcttgtgttagacttggaaggtgacaaaacatgagtgagcgggcgccccaagagctttactcaaagggatgcaccgtataagaagcgttgctgtgtcggcaatgcttcttttttgctataatgaattaaaaaaggtggtaacagtatgaacgataatgatttctttgtagtcagttacaaaattcttagctatttaaaatattgctatgaaaatgataagagagtagatccaactattttgagtgaagggatgctctcaatttcaaacaatcaattcttgaaaacactaaaaatgttaattgatcaagggtatattgacggtgtgtatgtaaagcaaactcttgatgggatgttcgttttaaacaatcgtagtaaggcagcaattactatgagtggtttagattatttgaaaaatgatcgctctatgaaagaagcatttgaacaattgggaccagtacaaaagtggttgccaatcatcaaataatttaaactgatgttctttaataccgtaaaatcaaagcctacacacctgaaagggtggcaggcttatttttatgcgtttctaaaccatctagtagatgatcctttgacaatatgagtgcctcgacctaagtcgcctcttacttcgtaataatgattattgccgaaatatctaacatcgacgtaggatcctttggcaagccagaagctaaacttaggtgctttataaagcggatatcttaacttatatacttttacgtctttggttgttttaacttcatgccaatgccacgaatgtttactgatagcttgcacgggttgtgccgtaactgctgagactgcacctgtaccaccgagcaacatgatagatgccattgctgtaactaaaaatctatgtttcatatatctatatcctccaaaatagatattgccttaggtttatagtcgctggcgttgtggactttgatataatgaatgaaaaggagataggcaaatgaaagatgacattgaaactattaaattatatgtaaaaatcatattttacgaagtcaccatcatgtttggctggtggttgtggaatattctgggaatattgccatttcactgattccagcctaactcgtgacttaaccatgctataattaatgggataactattaatgtaatcacacttcaaaagatttttttgattttgccgttaatctttgaagtgtgtttttttatataatcttgacctttatcagtaatgtaatagccggtaatagcagggtgaccgccaacgaatccctcattgatgtctactaagccttgctttttaagttttaacaccatcattacttcatcattattgccattaagtgcagcaaaagcatctttattttttagctggtgcacctcaccatcactgatagacttcaaaaattctaaaatgtcgttcatatatttcacatcctttccagccgcgcgtgcggctttttctaatattccgacagcccaccatgaggcgggttgtttttgtcgtaatttataactaagttgaatatcttgaaatcgttgtctaaaacgttgaatacgtcttgcttgtttccagattcttccgcacttagtaatgctaaacctattcgatcatcacaggcgaaaagctcgggcgactcaacatttttcaaagcttcctcagcttcactttctgtgtagtcaagatagttagttaagattcttatagtagatttatcttcaatctgctcatataaacgagcaataaggtaagttaagtatctaggtgtgtaatcatcatgcatatttatgtctccttaactatgcaatatcagcaagtaggtaataacattccttgggaattgcaaaacttctagcaaactgataaatgctggtgaagtggaattcattttcaatgcaatactgttgcaataacttgatagcaaagaagttttcttgcgcttcacctttacgattagttatgtcgttcaaattaaagtatgattcttcctcgtgtagtacatgtccgatttcatgagccagcaaaaaaggagtgtgagtaggaaaaggccatctagaattcataattattaatctgccaggttcgttatagctaactgatggagcatagggcggtaatttataagtaaactcgataccaatgtgatgatcaaaagcgtaattcattagataccgcatcaatctgtcatagtttgagcgtgtctctaatgacatttcttctatattagtcatagaatcactcatccttatttagcatttcagggtgacgcttgaagtagccctttgctatatccgcataagtgctttttaattcgtcaggtaatttgccaccgtagggcatcggcatgtccagatctgaccatgtgagagcagtgccatcttttgctgtgctttctgaactaggattatctgattttccagttaagtagtcagttgtagtttcaaataatgctgctatttgattaagcatttcataatcaggctcatgcagatcatattcccagttagagtatcgttgtgcactaacaccaagcatttgagcagttttagatttactccatccttttgagtctcttaaattctttattcgttggctaaaagtactcatatcttgcctcctatgtttcaataattaatttaattgtagtctcaattaaagaagtagtgtatatttttaaaaaatatctgtaaaaaagtattgcattttaaatttatggtgttagtataaatatgtaatcaatttacagagaaaatttaaaagtgaggtgataaagtggacgtagttagaaaagatgctggaaagatctttgaacaacttgtggcttcaaaaggaattaaaaagaccttcattgcttctaagatgggaatctctcctcagtatctaaataacattattcattttggaggatttaatgcagactttgcttttaaagctgccaaagtgctagatgttaatcctagtatttttttgaccaaaagttacagagaaaatttaaaaatcaaatagaaggtgacaagaatgaatcaattaacattattcaactttgaaaattcacaacttagagttgtgaaaattgacggtgagccatggtttgtcggtaaagatgttgctcaaattcttggatattctcaaccaagtgttgcagtttctaagaatgtgcctaccaaggataaaggtattactgaaatggaaacccctggaggaaagcaaaaagtgacaataatcagtgagccggggatgtacaagttgatctttaaatctcatgcttcaaatgctgaaagatttaatgactacgtagcaaccgaagttcttccagccattcgtaagcacggagcttatatgacggatgaaaaagcgttcgatgttgtccacaacaaagatggcttagcaagtttgttacagcaggccgcagatcagctaagagagaaggacattcaaattgaagaaatgaagcctaaagccttgtttgctgatgcggttacttcaagtaaatcaacagtgttgattggtgatctcgctaagatgattaagcaaaatggtgttcatcatcttcaaattgtcgaaaacggcacaaccaagacactaagcatggggcctaacaacttgttcaagtggatgcgtgcaaaccattacttgattgctagaaaaggttctgattacaattcaccaacacaaaggtcaatgcttctaggtctgtttgaaattaaagaaaagacgattgtccattcagacggtcatacaactatcagcaagacaccaaaagtaacaggaaaaggccaacagtactttatcaatctatttctaagtggcgaagttgcataaggtgttcgagtttatcaagcaggaaagagagcgatggacatgaagcaagacgaatggaaatcaaagccaatcatagaaataactcagaaagacgtggaaagaatgacactagatgagttaaagagaacccaagttaatttgcttattgaacggttatacgtagctagttatgatgactgatcaaaatatgcctatatgtcaggttgggttgatggtgaattaatcagacgactgggataaaaaaagagagaaaaaatgaaattcagtaaatacaaaaataagccatctcatgaagatgacttagacgaaaagatcgatagatttaataaaaaagcttactgggattatttgattccgtttttcgtaagcctaattactacactgctaacacttgcagcacttaatggaaaataagtggaagcaattttgtagtgattagagttgttgtgattgaaacaaatatcggcaaaaggatgcttttaaagagagtgttccaaaaccttgcccatctccatttgaaaaagtttaagccttcatcggtaactttaaattcagacgggtatgaatagcgagaaggcataaattcaacgagctcagcttcaactaaaagtttgaattcataactattaacttcttggtgagaagtttcatcaatactaatttgattcagcggtgctgctttttgtattttgatgtatttctttaataattttctctcggctggcaaagtctcgtatttatgcataatcattctcctaacattaaagattcgatatttatttcattgtatcaaaaggaggagtgagcaaaatgacagaagacaagatttttgatgaatttaaccaattgattaaggacttaaccgacgacttgatcagagatacagatgatccatattcggattcagttgatacagctttgacaaaagtaattagtgcaagaagaagctataaatggaaaaaagccaacgatcaaagaatcgctgacttcaaaaaacagaatcctaatgaggatcccggaaatgcaaaagtagaaatttcgtctgaatattgatgagattaaaaaatatctcgatcaactttcatgtcagtataggcatctgaattgatgcggaagttctttctcaattcacagacaaagaatgaatcattcttatctaaaactgatgaaaagcactctctaatttttgcaggactaagagtagtttttaccagccaaacagatttttgaatttcaacattgtcgttgccagaaattgtagaaattacttcctgaacattttcatacttttgcccaggtttcattagatcgtaggcaataacatatgatgccatgatatcccctccttattagaggatgacttaattttagcagaaagaaggaatagcaatgcaagaattaattaaagttacagtccaaaatgatcagcaacttgttagtgcaagagatttacatgaaggtctgggacttaaaaagaagtttacagattggtggaaacaaaacagcaaagactttgagaaaaatgtcgattatacatattcacctaaaagtgcacatgttggaaatggcggtacaaggcaaattgatgactacgccttaacaattgatatggcaaaacaactttgcttaatgagccgcactgaaaaaggtaagcaataccgcaagtatttaattgaagttgaacgcaagtggaatgatccacaagagatcgtcaaacgtggttacgcaattcttcaaaatgaaaacacacaactgaaattggagaacaagaacttaactatccagttggaggaatccaataagaaggctagttacttagatgtgattcttggagcaccagacgcactagcagttacgcaaattgcggcggattacggttacaacgctaaggattttaacgaactgcttcataaagtaagaattcagcataaagttaacggtcaatggattctatataaggtttacatgggtcaaggctatgtaacaactaagccgtttacctttatagatcataaaggcagaaccagatcaaagccatcaacgtattggacgcaaaaaggcagaaagctaatctatgacattttaaaagataacgacattctgcctttaattgagcgcagtgacatcgaataaggcaggtgaagcaaatgaagttaaataaaaaaacaaggcttgtaatgcttacgagatggtatcgcaaggctacaagcctgtatgaaaaagaactgctattaaaacttattcgtttttaccagtccaattgacaaaggagactaaaacgtaatgaaaaaagaaaagattttcactgaacaacaaattgaagtaattaaagaaattgttagagatgaaatcaaaaaagctgacaagcagcgcttatcagctttgggtcaagaacttaactttaatcctgatgattattaataaactcagtgcttttatcagttagtttaaaccaagtgaatccacaatcggtgcaacgaattaaatttacgtacagtgatccgccaataagattgtcttttctcattacaactaaggcaaaagttgttggacctttgccaattgcaatggcttaacatttactgattggcattcaggacaatgcagtttattcattaaaatcacctcctttattggagatgactcaattgtaacagaaagcaggtgaggtatatggctcttctgagcattaacgaagaagaattagaaagatttattgctaagcgagttcgtgaaggtgtcagagaagagctagcaaagcgcggagaaattaccgatcaaaaaatgttcagccgcaaagatgcatatcactatcttggtgtaagtggctcgtactttgataacgcggtaaagcggggatttatcaatccgagcctgccaggtgacggcagaacgagatattacttgcgcgaagacctggataggttcgcggaagacgggaaagactatttaaagaaagcaaaactttaaggagaaaaagaaatgaacaaagatactgaattttcaaaagaaaagatggccaagcaagttgcaaagttgtttagcaaggttgatgaagacagcgcaattattatgtgcgtcgcaaatggaagcaatttaagtgaattagaatatggcaatccgttcgttttagggggggtaatccagcatctaactgacgaaatgcgtgagcagattgaaaaactgcctaagtatgaagccgctccattgatgatggacgctctaatgaaaggattaaaagggctacaagatgactaaaaaggaatatgaaagagaatacggcaagacaaagcttgaccacgtgctaagccatatgaccattgcattcggtaaaatcctggaattcatggcaattctatttttaccatttgcaattgtagagcagctatgcatctacggcgtaacgcatcccgaccaaatcatttcactgctgctagtcttgatgatcattctcacagcgctgtcggtgcgtgccgttaaaaagctaagaaagaagtgatgacaatgcaggctaaactttttggtaagcggttgatgcgtgctagaaaaaataggcaacttacacaagtgcagctggctgaaaggattggcgcaagtacaacgactatcagccggtatgaaaatggtttgtcttttcccagcaagagaagacttagcgagattgctcattttctgggcgtaaaagttgactggctattaacaggatttaaggaggactaatgaagttatggtacaagttcatcaattcggtgtggcgtatcaacgagccggtaagtacagcgagagccagcttatccttatggctaacagtaacgctattagcggcgttagcggttctgattttgcgactatgccagtagaagttaaaaagattttaggtattaaaaaagcactcattgagtagcagtcaatgagtaccagacaaaataaatcaaactaaaggaagtataacacatggatacatataagttaagagacattggtgcaactgttaacacctttggagacgaatatcacacgttcagtgatgttctaaacgacatgattaagattgaccctagattggatattagcgacgtacaggacctcgtagacacactaggggggtataaagatttcgaagaaagcgcaaaagagctttgcatgaaaaaactcaatggcgtggacgaggacgaagaagaccccgaagccgaatggggcgacggcatgtatgaccgtgccgcaggaaagtaggtggcagttatgcatgatgcacaagagtggctagacgggatcatcgaagatatccctaatatccgcaaagagatgctggacgactgtcgcactatgaagacctatggtaaggcaaaacagtacgctaaacagttcaaaattgactttgagggtaattataaggctacggcagaagaacaagcacagagcttatttaacggccttatagaggacgtagtaacagaactcaatcgagaatccgacagaggagagattaaacatgactgaggcagagaaatttgcagagatgaccaaggatgaactaattaagattcttgatcggttgcaagatgaaaagaaagaacaagccaaaaaagacaacgctagcgtttatgagcgtctttcaaaggtagatgtttctaagtttgttgataaaaagaatggtcttaattatctaagctgggcgaaagcctgggggctggtaaagagtatttttcccgatgctagttataagttacgggaatacccatattacacacaaacagcagacggtaattatcagcagattggcacccatgattatcttcgtactgagtacggtgttgaggttgaagctagcgtaactattaaaggcgagacatatagttcaaagctttatgtcatggactttcacaatagagcgcttgaccctaaaaaggtcacttactttgaaattaataaaacgcaaatgagggcgttaaccaaggcgttagcatttgcggggctgggtttgaacatttacgctggtgaagatttaccaagtagtgacgaaaagacgccacaacgcaaagaaagagtgaccgagcaagaactaattgaaaaagcaagaaagagcaaaactcagtacggtggtggcaatgaattagttaccgacattgtgggacttgaaatcgatggagacaagcaagcaaatgcttttttaaaccagtggtgtgaaaaagatcagaagaacaaaaatttatataaattcattattaagaatcagttagctacacacggtatgaaggtaggagcataaatatgagtgaaaaacaagtatttgaaggttcaagagctttcttgatgattccaccagctattgcaagagataaagagcttttaaaaaagccaaaaacaattattttgatgggtgaaattatctcaatgctcaatgttaccggcgaattttttatgagtaacaagaaaatagctgaaaggcttgatgtatcagcccgtaccgttaacgaatatttaggaatcttagagtcaaaaaagttaattgaaagaactaagataattagtcaagaaaacggcgcaattgtgggtagacaaatacgtgctggcgtagacctagtgaagcgggcttcactagggtggggaaatacgcttcatgggggtagtgaaacccacttcacccccctagtgaagcccacttcacataaatataacagtaataatagaacaactaatagaacagtagaagatacatatagttctgctgacgcagaaccacctatcccttacaaagaaattattgattatctcaataaaaaaactaatcagcatctacgctatcaaaccaaagcttatcagaaattaattagacaacggtttgaggaaggtgcaacgctagaagacttcaaaaaggctattgataaccaagcatatgcgtggcagggaacaaagttctggaagtacatgcgcccgtctacactgtttcgagcatctaagtttgattcttatgtgaatgctaatgacttaaatcaagcgaaacagccgtctaatggcggctacggtggcgagccaaatataagtgacattccagacgatgatttaccgttttaaaggtggtgataatgatgcaaggactagaaggaattgcaattaaaaccgaaaaagcagaccaagtatgtccaattcataaaactcaaatggtgctagaccgcaaaggcaagccattttgtattgaatgtatgaaagaacaaactgaaaaagaaaagaatgaccaagttaaacgctttatgcatgacaaggtcactaagattttacgtactagaagcttggtagatagaccagaggacttagaaaagtctttggaaaattacacggctaaaaaaggatcacaagaggcttcaatgggtaatgctgcttataaaattgcccatgaactaattgataaccctgataaagccatgacaacgttgatgtatggcacgccaggcgagggaaagagccatttagcaatgtcaatccttaatatcgtaaatgctaagagcaatccaccacaaacttgcctatttatagacgttagtaagatgtttgacatgatttatgaatctatggaagatccaatgagctggtggactaaaaagaatgctattaactttttgggtagtgtaaatgttctagtgattgatgatctgggcagtgaatcatctatgcgacagaatgaggcaacagaagcaactgaatttaaacaggacgtattaaaacagattcttgataagcaaaagaggctaatcgtcacaactaatttaacgcttaaagagttgcaacaagcatataaccctaaaattgttagtcgcttgttatcggattcacgtggtagacgtttagattttacaggaatttcagataaaagattggagctataacacatgattaaaattattgaaaatgcagaagaaaagagaaatgaatcattgaagttgcaagttggcgatacgctttgctgttggaatgacaaggatgtgctgttcaacgttgataaaaactatttaatggtcactaaggtaactgacttttcagatttagaaaagccttatacactcactgcacttaataccactgatgagcaacatagtgcaactaatgaaaactacgtactatatttttattcggatcttgacaatttagcccgagatatagcggacagctacgatcatataaaaaaggtggatctagtggcaacagataacgatgacgaagattaaggtagtacagccaccatgtgagtactgtgactttaaaaacatgaatcgagccgcatatgcatttagagaaaagaatggcaggtttggtggcttcttgtcgctaaataatgatggatcctttgacatcaatcgagggatgtataagacagaaaagaaaccgaatttttgcccgaattgcggtagagatttaaggaaagacgctacacaagataaagataagtaattgagaggatagacaaaatgagtaaatttaacgaagccagagccaaaaacattgaagatttaaaaaaggtcgttaagggagaataacgatgaatgacttactagctatgtgccgtatgctaaggttatcggcttgatgcccccgggtattaatttcacaaatcgacaagaattgtttgatttgctgacagagatgaaggtgaagatttatgaactgtaaaagattaaccggacatggacaagatgaaatgatgttccattgtgatagttgcggagtaaatatatcgatagacacttacgatgttttaacggcagaagacaacttgcattgtcctctttgtggcgcaagcgccggtcatttatccgtctatatgtttgatgaaaagaaactaaagaaaattgatggcgactttaatgtgaaaattgaaggggataggatttgcatttatctttgtgcagttcgcttatatgaattatatggcgaggataacatggctatttatagcgtttatttaaaagtggagaaaatggctaagactgtggaggcaattttggacttttcacggaaattggatcatttaaaggagctatacaaaaatgaaactatttaatgacttgaaaaagctgtattgcagtccggacgaactagaagtaggcgacttcctctattgctggataactaacacccattatcgtgttttgagtgttaacggatcaagctacgtgactattgagtgcgttgagaccggatggacaacaccagtagtgcccacaattgataacgcattagaagatattttggctcacaatgcagactttgacctaaagcatttgacaaaagttaaacctaacgaagtttacatgatttttagcagaaagtgagggattacatggcagtagtaaacgaagtaatgacaataattaatgtgattatgtcatttgcattagtgattttaatttttatctccatacgtcagaatataagattctcacgtgcaaccaatgcaagccttgacattctgtttaaaaggcaacagctcctgtcggaagacttggatcagcttcaaaaagcattaattcaagtccagaaaggtgaagtagctaacgctaaatctatcaatgccatagcaaggcaaatgactgagttgcatgaccttgttattgaagatcagacaagacaagaccaggacatcaaggcgctggcaacgcttataagcggcttgaaaacgtccagctatcgaagcagaaatgataagcattttaacaatgctttaaagaggattgcaaagctggtgaaagaatgacggttaattgcatcaagtttgtaatacctggtgagccacaaagcaaggaacgcccgcggacagttcgtagagctggcggtgttagaacttatacaccagcaaaaacgcaccgatatgaggatattgtgagatattttgcagtttacgccagaaaagaacacaagataagtgagccaatcaactcacagtgtggcgtgtccataaaagcctatttcggtatccctaagagcttttctaaaaagcgtagggaattatgcttaaaaggcaaagaacgccccacaaagaagtcagatagcgacaacatcgcaaaaataatctttgatgggatgaacccaaagatgaaattaaacaaagcgctacacaaaaaaatggtgctgcaagatggattttatgaagacgataaattaattgttacgcatagcgtggagaaatggtattcaatgcatccccatgttgaggtaacagttacatgggaagattaatggcggagtgatatacgaatggcagatagagcagagcaaatgacgctagatgataatttagaggttgattcaaaggcaaccgcaaacaacgtgaggaattttcttacatttaaatttgaacattttcaaaattatgcaggtttaaatgtttctgatctgtctgttattgatgattcacacctatctagccccaaaatggacgcgtcaggcgtttcttcacatggtgggataaatcatactgagtcaagttttaaccgcatcatggaagcagaacaagcatgtaaagcaatctataaaactataaaaaattgtagaaatggcggcagaactccatatcaaaaaatcttgtctgaggcttacttgcaaaacatggaagattacaagattcagcaggaactaggctatgaagatagtcagtactacatcaaaaagcgccaagctttgtgtgaatttgctgacagattcgaaaaatggaaagactggtatagcatcccctactttaaagatcttcacatttaccgaaaaaataaaaacggagtttaaacggacttttatcggagtacaagcggagtgaaatggctatattatagtattgtcgaaaatttaggaagcagggttttcgatgaagtgtaggtacaatgacaatttgtttttctgttacgagtcttaataaaccatatatttattaaaaaactccaattaaccagtaacggcggctggcgccctagaccaggttcgattcctgatgctgttgtagcccgtttattcgggcggaatggcaattctaattccatatcccaaattttataatcactttgcctcattcgaggcattatgagctagcattcggtgtaatgccacatacgttttatataattgcctggtgtggtgaggttcaactcctcactagctcttagccggcgtggaaaaccggcactaagtataataatcatatttattaattgcataagtaataaattgaattttactcgtctagtttgggactgtgtcccagaggtcaaagcagtagtgttgaggcacgttaaatttaagtcattaacaatttcaacttggtgcttttgagtttttaacttgaaaatgttgcaagcaccaagaaccatagatatggtatatcactgaccaagttggtcacgtgtgggggttggattccctcactgcttatatgaggaagcgtgtgtataaacctatgacagggttcacgccattcaatctataaatcgacagcgacgttctgccgggataccgacggaatttcagacaagccaaagggtaatagctttggttgacctacaccgaaaaggaaataggtgtcgttggttgagtgagaaagcattaaattattgataaagtaggcaacaatgtcagcagaattacaattgccggcggagatttaggcgctccgtgtaaagcagtctcacgctaatctggcagacatgtcagggaaccacgagataaatgtaagttaaaattctggtccacgatgatccgcagaaatgcgggtataactgatacgtgccgtacgagtagcccaaaacgtggaaattacaatacaggtttttgcataaccatcaatcgcattgttgggtgaaagttggaggataaatcctcaccaagatttaaattaagcaagagatataaggtcgctccttatattgcgacttgcttaaacttgtgactgaataatcaacgatttaacaagttcaagtggttaatagccacccgcataactaggaatatagccaaaacggtaaggcaacgggctttggtcccgtaatttgttggttcgagtccagctattcctatcgtcggttcgaagctagcgacgtataaaataaagcaattatgtgaggcaataaccggtcttacataaatggttaagttagtcacgcacaggcgtgcaaatggtttgttagtccagaggtctagggcaccgcactgtctatgcggaaacgtcggttcgatttcggcacagaccgttgaggttagttctgtgaacaaagtcggtggaggacgtctgcattccgacataaagcagagaagactaagagtcacggaatcgtaaaagaggaaaagcttaatgcaagcatcttgcctcatttgatcaggtagggagttagctcagatggtagagcgttgcaaggatcgtgggttcgagccccacactccctattgggctgcaaaagctcaaatatatgctctttttgaagttcaaaatttattcatttctaacccttctaactgttatccatatagttagaaaactacagtcgtactgtggcttttagactcattgctaagcggcaagcggctggtctccaaaaccagtaatctaggttcgaatcctagtgagtctgtttcaatttaataagcatttaagacattccacgctatgtgtgatgtctttttttgtttccagggagtaaaaatgtatcacaaaaaaccagataagccagacaaatcgctagccaagtgggttgaagaaaagaacagcaaggctacaccaaaaagaagcggtttttggcacgaatcgaaatatcgcccaccagaggacgacatcaaagaagctgaaatcaagcaagatgaaccagaattaatcattcctataccgaaatcagtagtaccaagtattgaggactacgagagcacgtttttgcataaggaggatcaagaaagtatgcaaaataagacattagtcagcaagttaactgatgaaagacaacacttacaagatgatttattaaagattgataacaagattatcaatccgctaggcgtgtcagactatcaggttaaattgtggaagatccagcgtaatgcgatgatgaccgtggtcaacgtcttagacatgcgtatcagcgatttaagcgtggagggcgattaattgaccccagaaaagtattacgagcttagaaagcattataagctggtcaaagaagctgaacatttagttaagtacaataccagcaacaaggtagtagacatgattaaatttgtggcgtttaaacaaaaagcgggcatgatgccacaagagtacatagaaaagtatggagattcatggaaggactaagacacccgctgacacaagaaaataagaccataggtgaggccgtggcacataaacatagaagataccgcggcgttaaaaatccgcttagagggtcattattagagcgcagaatacaacgcgccatttattgtgttgaaaatgacgtagataaagaatttattgattggtttgtcgctgatacagggatgcaaccacaagaattcttagacaaatggagtaaaaaattaggcatatgaaaaaattgaagaggatgctacggaataggcatattagcaaattttgtagtgtgattttagaagatttagagagggcctaaaaaatggggctattcgttgtcttatggttccggtaatttggaaaaagcaaaattttctcgttttaaagacctttcttcaaatttgaatgaccgatatgagaaaagctttaattctgctgttcaagaatataaggactacttaaaaagaaagtaggtatattcatgggtggtagatcgagttcttttaagtcaactaaaaccggtgcttcatatgtccgccttcgtaatcaggctaggcaggcagctacgaaagcttttgataataatgaaaatattcataaaaaatttggtgaaattgaagtaaagcgtgttagcaaaaacagaatattagttaaaggaagaaatggacaaatttctacggttgtgcctgactggaatatgacaaaagacaatatggagacaaatcctcgctttaaaaaggctgcttttgtaaatcattacatgagtgaagaggatattaattacttgcttcccaagtaagttaaaaataagttaagagatcaattactggtggaagaaacgactcgtttagcagaaaaacaggtgcatccctgaattaaagctttttggctctggcgaaactaagatcatataacaaataaaggctattcacctcccgtaattaaatgaggaggtgaatagccttgtcagaaattattcttactttgatcattatacttctgataattgttgcgatcaagtcgtaacgccagagccaagggcgctcgcccttgtgcggtcgagcgccgctaataatataaaagtattgaattgaatataaatatgcgttgctgagagatgacgcttattttttatgcaaaaaatcttttcaattataaaaagttagatggaaacattactcaattcctaatttagctttaataccatctgctaggatggctgaaaaattaagacctgcctctttaccttcttcatttaaatagttagggatggttaaggtctttttgactacacggttatcattttttcgcttatattccgaaatattaacagtaaccaaagtagcaatttcattgtttttggttttaggaattttagcatttgattcaggtaaatcttctaccagtgacatggttccgattaaatctttccccatatcaattgcttctgcaatagttcttccttgggtatcacggtcaaggtctggaacattgaccgtatatttgattttagggtcatcagttggagttataacgattggaaatacaacaattttatcttttttcataattaacaatttaagatggtacacgaataaggggtattgccccttattttaccctttaagattatttcgcttcataatcttttcccaagtgactttgttaagatcaccgtggcgaggaattgattctgaatgatgaccgttggtataaatatcatgattatgaccatgacggtcgaaccaccagccattttcctttaaaactttaagggcatctcttctttttaccatcttatttctcctttcacatattataatacacgtgtttaatacgtatgtcaatataaaatgcagattagtttaatttttttaggaggtgaagctagttttggcagagcagaagttaacaattaaacaaaagaagttcgccgatgaatatgtcaagactggcaacgccacagatgccgctattaaggcaggatacagcgaaaaatatgctcacaccaatgctaataaattactacaaaatactacaatcaaagcccgtattgacgctcaaatgcaaaagctcgaagacgacaagattatgaaagctgatgaggctttacggttgatcacagcaattgcacgtggtgaagagactacgacagttgaaacccaagagggatatgagctgacggtgtatccaaccatcaccgagaagcagagagccagtgaggcaatccttaagcgttacccactaagtccacttgacaaagcacaaatcaagaaggcacaggctgacgctgtcaaggcagaagcagaagccaacttggcaaaggcacaggcggaacaactccacactgttgctgataagacgcgtgagaagatggacaagttaagcactgaggagttacgcaatttagcaaagttagcaggtgaaaaagatgattaagctaacagccgctgaaaagaatggcattgcattagccgctaaggaatcgctagcacgtagaagttacgcagactatttcttgctagccaatcctgaaatgaagctatatccacataccaagctaatcactgaaaagctccaaaagatagcagacggtgaacagcatttctatatcatatctatgccgccacaacatggaaaaagcttaactataacgaaaacttttccaagctattacttgatgaaatatccggacaagcacgccatgatagtcgcttactcacaagacttatatagtcagtttgcggcaagcaacaggcgtgctttttctgattggtcgggtccgttgttcaacctcaaaacaggcaagaatacagcccaaacattcaccgtacaggaccacagaggcggcttctatgctacttctgttcttggcggtgctactggtatgagtgccgacttgctggttattgatgaccctgtaaagaacgcagaagaagcgcactctatgaccgtcaaggacaagatatgggacgaatggaatttaacgttttacccacgtctgcaaaaaggcggctcggttatcgtaattatgaccagatggcagacagacgacctagcagggcgcttgctatctgagtcatccctaccatgggaagaaatcaaattgccagccattgcggaggacatcccagcagggacaacagacgcaattggacgtaagaacggcgagcctctgtgcccgcaattgcacatgttagatgaattacttactcacaagcacgacatggggacggtcaagtttacggctctttaccagcaaagcccaattattgagggcggtaacatcttcaaagatgaatgggtaaagtactacgtggacagccgcgaaaccatggcaaggctgggactaaccgaaaaagatgttgctattttgccccgtcacttagatcaaactgttcaagcatgggatgcaactttcaagagtaaagctaatgacgactttgtagcaggtcaagtatggtcacgtcgtgatgcaagctattttctacgccctaattggtgccataagcgattgagttttacagaaacgctagacgctattagagccatgtcccgcatgtatcctgacgctactgtaaagctagtggaggacaaggcaaacggtccggcaatcattgacacgcttagacgtgagattccaggaattatgccggtgtcaccaggcgcagacagcaaggaagcacgtgcggcgtcagtgtctccaatgtgggaagctggacaggtttatataccgcatcctgcatggcacccagaagttaaagactggattgctgaaattctaggcttcccaaatatgccgcacgatgacaacgtggactcgatggtttacgcattacggcggcttaacaccaagttcggtggtccaatcgttagatattaggaaggaggacgttaatggcaaaaaagagaataaggcacttcaaaacgccagttgtgcggtctgattcgcttgacctaagtcctacggttgactatgagtcgattgcatggaagacagctgatcactcacagaactatgaagccttagacgatcgatacaagtatgatgctatcgctcataagatggtctcaaaggttgcagaagacgccacaagaaacggattccgtttagttattccaggcaagccagatttacaagagatgtatcaaaaccgcttaaatgacttaaaaacgcaacaggttttatctcagcaaatcatctatcaacgcaaacacggagatggctatataacttacctagttaaagagacaaatccaacgagtacatttgaccctcttgaccctgaaaacatcgagaatgtggtagcattgcacgcattcggtcaaaagaatgtacaaagctatctaaccgacgatgatccaacgagtgacgactacggcaaagagtcaaaattgaagattcaaccaaaacaagccgccaccacattagacaggtacggtaatccaacacaagaaaccaaggacgaaaatgcgattgttcttgatgctaccaggtatagtcacatcagcttagacaagtttgacgatgaccaaacagggacatcaattatcaagcgctgtgaaaagcaactcaataatatggcgattgctaccgaatcagtgggtaaaatgctacgagaatttacgtttaaggtcttccaatctgataggctgatgaatgaaccattagaccagttcagacgcgacagagacgaattagcacgcgtagcaaacaccgaagctatgatgtttactggtaacgatgacaccgtgaccaagctagcaacgccaactggtggcatgaatgtcttacttgattacttgtggcaagacctttcaacagcgtcaaacatccctaaatcggttttgacgggtgaacagtctggcacgctggcaggcgcagggcaagacgtgcaaaactattatgacagtgtgaaagccttacaagagcagattttgaagcccgaaatcatgaatattgtccgcttgttgatgtattcgaaagaatttggcggttacttagacccagacagcttagaatggcacattgagtttaatccgctatggacaccggacgacaagacgcaaagcgagacactggtcaaccatgcaaatgcggccggaacactggtcacaaacggtatttttgcccctgatgaagtccgcaacatgttcaacgggcaaggcaacaacgcaattcaagggatgcagaacaacgcaaacgtgactgacagcgccgacaatatcgaagctcgatatacgcaagagcaaattgaccagtactacaaagatgttgaaaaggctggtatagatggcaaggcgtagaaatggctacccattgaagattgaacggtcgtattaccgaggattagccaaactcattcgagaatggcaaaaaatagctttcagagtggctgacgcgcaattaaggcattatcttattaacggtactaaaatgctcacagatgcggataattcgcgtaatccagagtggactaattacgtacagcaaaccttgaatttgatgtctgttgatatggaaaacacggtcacagatcaaatcttgcatgacatgactatgcggtttgtttatgcggttaaccagttcagtgctaataagacgcgtgtgcatcaagctaatgtgcagatgaagatgggaccttatgcgttaaatccgttaagagataacgcaaaattgcgcgaatatacctggggtaagatcttagaaaatacgaacttgatcaaaaccatgcaagggcgctatattgaccagctgaaaggcgacatttaccgcattgtcaatgatggtggcggtcttactgatataagccacgctatcagcaatcgaactggtatggctttgcgtcatgctgacctaattgcaactgatcagacaggcaaaatactagcccagattgacgcttaccggaacaaacaggcaggctcaacgcgctatatttggcgttcaatggaggacaaacgggtaagactaaaacacagagagttagacggcaaggaatttaagtatgatgaccccaacggcggggataatgggcagctacctggcgagccgataaggtgcaggtgttacgctgacccgattgactaaaaattaaatgaaacacaaacgcttcctcaatgcgagggagcgcttttttcatgcccaaaattagcaaactttgtgaaatttttaagtattccgcccgtgggtgaatctcatttaagcccgttaaatcaacattcttactttgtgaaattttaggaggattttatggaagattcaaacgaaattaaaccagtttcaaccaatttaaccaatgaagaaactaagcaagcaattaatgctttgaagcctaaaagcgtggaggtagctccaaaggtagaaaagccaattgaagttgtcaaaccaacaccagtagcaaaggaggtgaagccaatggcagaagtaaaagaccctagagggatgttcgattatacaggctgcgaacagtacaccgtgcaagatggcgaaacattgtttgatgttgctcaaaagtacaaggtcgctttgcaacagttgcgttatttcaaccatgtaccaaaggacaccatgcgagttaagcctaggcaaacactgtacatccccaaagaaccggtattagtgccagtaggcgaatagcatgaacctgacacggtacgatacagcgacgattaacaagttttctgctgattcacaaacaggattcttgcatgtaagcaatgtgccaatcgcacgtgtgggcgtttttccttatatcggtaaaagtgggcagatcaccatggaagccaaacttcctgatgatttattgactgattcggctgttgagagtgcaaattcaaagccagttacagacgatcacccacaagaatcggtgaacgtgaccaatacgaaccgatatatgaagggattaaccgccaataatgcccatgttgatggtgacaagctgaaagttgacatgactatcaccgattcggcattaatcaaagaaattcagggcggcaagcaagagctttcaattggatttcaaactgatgtggtacccgttaaaggtactttcaagggtatggcgtacgattcggcacaaaagaacattcaaattaatcacgtcgcagtagttaaacgtggtcgtgctggtcattcggtgagattaaccggtgacagtgcagaaatggttatagatgattcacaagagaaaggaacatcaatggaaactacaaaaattcgtttagatggtgcagatgtcacagtcgcaaccacagacgcagaaagaattttaaagcttgatgctgacaacaaggctaataactcaaaaattgccaaacttgacgctcaaattaaggctttgacagccgaacgcgacaagttaaagggtggtgctgatgctaacaagaaatcacttgatgaagcacaagccaaggctgattctcttgaaaaggaattagccgcagaaaagaaaaagtttgaaggggatgcactagatcaagcaatcgctgaccgtatggcacttatcgatgaagtaaagccatatgttggcgattcttttgattttaaaggcaaatctccgaaagaaatgaagctagaagctatcagcaagactgattcagtcgatttaagcgctaagtcagatgactatattgacgcttattttgactcaatcaagaaccgcaataactctggcgtagttggttacacgggtattgaaaccaatgtcaagacagacagcgtagacaataaacccgcaaaagaccgttaccacttagcctaaggaggtaattaaatggcaattccagatggagaactttacaacaccggtgaacttgcaccaggtcaattagcaaccattgaacgcgcaacaatcaacaccgaacaagcaggagcaccaatcggcttcggtcaaggtgtcgcaattaaagatggtttggtagttccagcaaccggcggaaatattttcggcgtggctttacgcagaacttacttaaacgctgactacttaatacaagaaaacattgatgctgacaagtggcaaaccggtgaattatttggcgtagctcgtgagggaactattcaagtaccaatcaatgaagatgtaaatgaaaacgagaatgcagccgttgataaggacggcaatttcaaaccagcaggcgctaacgatacagtcgttggcgtctttttaggttccggcaataagggcggtaccgcacgcatgcaaacccgtatccagctttctaatacggctgttacaggttcaggtttgcaaaatgctaacgcgccacaagttgaccaacctagcacaccagcagttaacccaacgccagcaacaaagccagcatccccatcaacgggttcaacaactggcacagataacaagaacggaggtaaataatggcgaataaggactatttaacgcgtgaacagcttacctatgttgacaacgttattaagactccaaaggaacgagaattaacagctatgtcactgttccatactttcagcgttccagcatggactaagcaaaccacatacaaggtaatgactaccgctggtcaagccgctcattatgttgacggtgccgacgatatcccagtagttgacatgaatgtaaccgaatcagcatccaacttgactgatattgcgattgcggttagatactcacgtcaacaacttggtgaagctcaacaagtaggcatggacatcttaacgccaatggcaacaagagcccgtagagcactagcagaagccgaaaacaagcttatttttaatgggcttcacaattccaatccagcacttaacattaacggtttgactgatccagtttctaagttaggtgtgcaagaatcaaccgcaccggttacatttgatgcacttgctgacgacccagacaacaatttaaagattagaaactggctcaaagacgcaaaaagcaagattacacacttggctggctattcaaatgctcaaccaattttagccttgccacaaagcgcaattgatcagcttgacatgccttataaccaatacaacccacaaatgactgtattgcaaatgattggaccgtggtttaaggacattaaggcagttcctgaacttgaacaccaaaactttggctctaatggcaataaacaagatatgggttatatcttcttgaatgacgcggacattgtacaaattccagtggctcaacaagtacaacaattgcaacaagaataccactcaggacgtaccacaattccttacactgaacgtcttggtggtcttgtaatgtactacccacacgcatttgtacaattgcacggtatcaacgatccaaagaaagcctagttcggaggtagcctatggacgatttacaagacatgcttaatgctgtgaagcaattaagcccagatttaacttctaaactgtccgatgatgcactaaatgggctattgactaatgcttatcaaatagcaatggctgatggttttccaaagcttgccaagaacaacgatggtgagactatcaaagctcgtgacatggctacgcaatacttagccttgcatttaatcacgattaacaaggctatgggcgatggtggcgccaacgttaccagcgaacaagtttcagtattgaagcgaacttatgctgacgttagcaaattaaatctgttccaacgttcgccgtgggggcagctatatttatggctgtataacctttatggcaacggaagcattacaagatatggattggtgcaacactaatggctgacagctttgaagaaatcgaaaataggctagatcatatcacgaaagaaatggactatttaaaccatcatcaggtagtaattggctttttcagtgatgaaaatagcttgcttttgacgatcgtaagagccaacgagtatggggcacacattcgccctaaaaacgccagcggcttcttatggattccgtcaaggcaggctattaaagagttcggaaagaacgttactgcaaaagacgttagaaataagtatcaattgttcatccctaagggcaagcacattgcggctgtcaatcaagacggcaaattggttacatatttctatctgatgcaaaaagtagacattccagctcgtgcttttatcagaaaaaccggcatagattaccgtcaaaaataccgccgatacatcaaggcaggtattgaagagattatgtatgatggcaaaactggtaaagacttgcttgaaaagctgggacgcatgggcgtaagtgatatgagagaagtaatgagacgttggacaaagccaggtaacgcaccgctgaccatcgataacaagcgtggggctaataaccccttggttgacactggacagcttcaaaaacgcattacttggaaaatactgccaatgacagggggcacgctatgagtttctacattccgtttgcggatatgctggacagttttggagtagatttaacggtttacccatatgacagcccagcaaaaaaagctcactttcactacgtgggcggtgtaagagttgaagacgatgacgcgccaaaggtgcagccggaacagcgatatgaaccggttgtaccgaataacgcacaaaattctttcatggctcaattttatacgggtggtgagatggcgcaggcagatctcttatggatcagctctaagctttatcccacgaactcggtcgtagaagtgccgtctcagccaggtcaaaaatatcgaattactggcaattccaactttcaaggctattctgacgttgtcatttacgcattaaagggagatgataagcaccctaatggctagcaatttaccggtattgagtgatcattttttagtgcagtacatacttggcaagctggtcaatcaggtcacgggatgcgaattggttgaagatgcaaacattgacgaaatggaggattatccgtttttcactttcaaatggattgactttgaccaagagccaaacgccgactggctaggcaagcatagacagtatatctgcactatgcagattgattgtcactcaaattcgagcgtacaagctatgagccttgctagaaagctgtttgaagcactccacgaagtgccgtatcgcaggttttttaagcaagcgtacatagtacctcaaagcattggtaacacgggcgatagaaccactttacagggcattaattatgatcacgattttggttttgattgctctttcaccgttactggtggctttgagtttttagaaaaagacctcaactttaatgtcgaggattacacaattgaatcaattaaaggcacatcaagcgttgtcggcagtgataccgacggcgcttttaatgtgtccaaaaataaggaggaaatttaatggcagatgctaagacaaccactgtcgttgcaccttatgaccgtgtcagcgacgtaaacgtggttatttcagttttacacccacgtccagtagttgggctgggtaatcttttaatcctaaatgctgtcactgcaaaggctccaacgccagcgcaatcagatggcaaagacggtaagagcaccgatgctaacgcacaaactacgccagcaactaccttgccagatcaattaagcgtacaagaccgcatgaacggaatcctattacgcaagactgacaaggcaactggcgcaatttaccgcgaatacaagaacattgacgcggttgcggttgattacggtgaagacaccgcagtttataagaaggcacaaacctactttgcacaatctaaccactccgaccgtgtggcagttttggactatgacccatcaaaggcatacgacgctttgaaggctttctggtactttaactggacctttgcagttcgcacatctaatgacgttgacgacaacttagttgctctgtcaaacattttcgaagccaacaagaaccacattttagtagttcaaagcaacgatgtgactcaatttgacaagatttacggtcaaaattacaccgttggcttgaagcatgacaccgctgaaaacatggacagtgctctcgttggggcagttgctaccttgaccgttggttctgtgacctggaagttcaagcaattaaagggtgtaaccccagaagtcttgacctcaaatgaattgaccgcaatccatagagcacatgcattcgcatatgtggaagttagtggtgttggtgaaacatcagaaggctggactatgtccggtgaatacattgacgtcattcacggcattatctgggtcaacaccaacatggaaaacaagttagagcaattcttgcaagaaaatggcaaggtctcatacgaccaagttggaattactcgaatcaatggtgttgctacgcaagttatggaacaagcctatgcgcaaggaatcatcttaaccgatgaaaccactggtaagggtgattacaccgtaactacttcacaacgtagtgaacaatcacaacaagacttgtctgaccggcattacggtggtttgagtttcacttaccacgtttctggcgcaattcacaccattaccgtacacggtgaagttcaatcagacacgattttaaactagaaaggatttattagatggcagctcataacaacgcacaaacggggttgatgggcacctacgacgccaataatgtttacttcactattgacggtaagactgcttatggctatggtgcaacaacccttttcactttttcatacgataacgatttgttatcagttcaacaagaccctcaaggaacaggtaccgcaagtattaacaacaaaactggcggtacctttactttaaccatcaatcaaatgtcaccatttaacaagatcattgatgatttagccgatgaacgtcgtgtcggtggttatgcggttgatgcttgtgatggttcacgtcactatgtgggggcacacgcatatatccaaaagaagcctgacggtggtgccgcaaacgaagccggtgaaagaaccatcactgttaaggtcttaaacgttgtagaaaattcagttctttaattaaagcgaggtaaaaatttatggacaacactactaacactgaaaaccaaaacttagaaactactgtaaatgttgacgcacaagcaacagaagcaccaaaggcagaagataagccaattagcatggctgatgtcttagctgctagaaacaagcaacttcaaaccggtgcagttcctaaccaacgtggtatcactaaggacatcactcttaacgctggaactccacaagaatacactttgacgcttcaatacccaggttttgccattgcttcaatgattgaagacgattcaacccgtgacggtgacgttaagctatcactcgtattaagcaatgctgttgataatgacgtatttgttcaaccacgtattaagagccttgatttctgggacactcacaagggtggggtagatgttgcccgtgaagtgctttcctttcttaacgacggaatcgacggcaacttggaataaggaacatctaaaagaagcggctgaccgttgggaagacccaattaggttggctatgcacggtattccgcttgatttaaccatgaaagcaaacaggaaccagttaaacatgtactgggaaatcgtgcggagagaagaaaaacaacgttttaacatgcaagcaagcgccaccggattaggtgtctggggtgatggaaagaaatagtgaggtgaagtcaatcagaaaataaactgatggcttttttattttgccaaaaagaaagggcgttaatacatgactgatgcacatgaaggcatgtcgctgtccttaaaagctaattttacgcaagtgaatgaggctaaaaaggctacacaggctttaaactcagcgttcggggaattgcagagacgtgcaaatagcttgcacatgtccgctaattttccaagagaaataaaccatattgacacggtaaccgcgtcatatgttagacgtctggaatctgagggtaaaacatacgaggctaatcaacaaaaggtcaaggcatatcagggcgcgatcggcaaattaagcgccgagcagagccgtttgcaaagtgccttgaaccgcaccactagttctactgacaaggctagtgatgcttatagaagtcagcaaataaaacttaaccaaacagttgctgaaatcaacaagtttaaagctggaattaagtccgctcaatctgagatggaacgaatccatccaaccgggtttaaccgctgggtaaagggtgctaatgaggtcaccaaagccaccagtacgatgaagagtaagctccacagcgcgtgggacagcatccgaggtggtgcaacagttgcggcggctggaattggtgccgttggtgcggctgccttttctggcgctaagcaatcagcggcaattcagcaaaggtaccgcgaaattaacaaccttgctgttcttggtggtgaaaagcaaaaagaagtaactaagtcggttactgaaatgcaacgtcaagggcgtgacatgtccattaaatacggcaagtcacagcaagaaatcgcggcagggtatgaagaccttgttaagcgtggttataccaccaaacaagcaatcggagccctccaaaccgaattgcaagccagtgtggcatctggtgacaaattcagcgatgttactacggtatcttcacaggttcttgacgcattcggtatgcgtgcagactcaaccagcaagatgctgaaaaacaccaaaaacgttgttaacgagttggcttactcggctgatgcaacttcaacaggttttagtgacttaggtgttgctatgtcgtacgttggtactgcggcacactctaacaacattagtttggcggaaacagcgtcagcgctaggtgttctatctaacaacggtttggaatctgacaaggctggtactgccctacgtgccacaatcaatggattaactaaccaagttaacaagatcggttctaagaattctatctttaccaagcttggcattaaaaaatctgaaatggtggacgcacacggcaacctgaaagggctgtcgcaagatatggctgtgctttacaagcacattgaagagcatagtaaaggtggctccgaccaaaacggcttctttaagtcgatattcggaactactggcatgaacggtgccatgattttagctaaacattcgaaagaagtagaaggcttaactaagcggacagaaaaagccggtaagactggtacgtatgtagctgaattagccaaaaagaacatgggtaccgcacaaggtagcgccgccagcgctcaacaggctatgaatgcctttaagatgacgctgggtaacgctgttttgccggcaattaacgaagcaagtaactcgcttgctaagttcttactatcaaaagatggtgaaaaattccagaagggcgttggtaaagtcgtaggtgactttgcaaacggtcttgtaagcctgattcgttttgctacacggcatgaaacgatgatgaagtttgtcggtggtggattcttagcaggatacgcaaccgtcaaagttgcaaaagctgtctcatttgtgggtggattgtacgaacagtacaagaagcttgctgatataagtcctaaggttgcatatattggtaaaaccacggggcagttaactggaacaaataccagctttaaaaacatgaccaagggcgcaaaattagctgttggcgtatctgctgtatttaatgcggctcaaatcggtaacgacttttatcaagctgcaactgctaaaaccgcaacgcaaagaattcaaagtgctggtgctggtatcggtggacttgtcggtgctggaattggtggagttctcggtggcacggtaggtgctacgattggtgcacaacttggtcaagctatgggacctgatgccgctaaaagttttgtaaaagcctttaatggacatgctgcgaagtatttggtttacggcaaaaaaggcagcaaatcaaacggcaagtatgatagtcaagccgaaaaatataatgaatccggttattacaccctgtccgaccataagctgaaaggtaaaaagcttctgtatgcttatgatgacaatggatactatgatttaaagaccaataagtaccatgatcaacgctcccttgctgaacgctcatggggaatgaatcatagattaaatttaaagaccttagcgcatccaaataatgcctgggatcttttgagtggttctgcttctacgatttggaacgctgctggacatattgctgatagagacttttggcgtagaagcggtccagaagtcaaaaaagaaaccaagggaacttggctggattggagtggcttttataagtggattggaaacaatccgcatcttaatccacacggtaagccaagtgatggaatggatagaactagaagtttattccgcgatattggtaaatgggctggaaaacaaaattgggactggggaggctttgatcctcagaaaaatggattcaataaatggctagctggatttaaaccacaagttcatggtaaaaagccccaaaatagtcaattgcagcttaaagcatctggaattcttccaaaagttaatgctaaaaaatgggctgatggagttgttaaagatgctcaaaaaggcatgaaagacttcccatcttggactaaacagcttagtgcaaagtctaataagtggtttaagtccaagtggaacggcatggagcgctggggtggtaaaactaacaaagacgttcaaaaaggctggaaaggctttacttcatggtcaggaaatttaagtcataaatcaagcaaatggttcaagtctaaatggaatggcatgaagtcatgggctggcggagtcaataagaacgtacaaagcggttggcatggtttcacctcatggtcaggaaatctaagtcacagatcaagtaagttcttcaagtctaaatggaatggcatgcaaagctgggctggtggaattaacaaggacgttcaatctggttggaaaggcattaaaacttggtttggcaatcttggtaaaaatgccgttgacctatttaaaaagccttttgaaggtctaagtaaatgggtcagtgatcacacaccaaagcctgtcaaggcggcacttggtgcagttggcaagggagtcaactgggttaaaggtaaactaacaggcaaggcacacgccaacggtgggcttatgcacgcctcacacggtgcccttgtcggtgaagctggtcccgaattagcatacaaaccttatgctaacaacgttcgcttgcttggtgctaatggtccgcaatttacaaaggtttatgctggcgagcatatcctgaatgcacgcgataccgcaaaggtattaaacggcggtttaggtaatgggctaaccctcaaaggctacgcaagcggaactgataagcttggtaaaacctcaaagaaggtaactaacgactacaaacaaattgcggacaagtcatccaagtcacttaatagcctttctaagaagagctcaagcacttggaataagattacacgtcaaacgggtaaagacagctctaagacccgaaaacgggctatctctgactactcagacatgcacaaaggcattgtcaagcagatggacaagacccatgacggtgttatcagtcttagtgaatccactgcaaaaggctttggtaaagcattaggcaaaactaaaggctttgccagggatgcaatgagcgactcaattggtgagattaacaagggtattactggaattgacaaggtccttggacagttcggcggtaatacctcagttatcaagccagttaagtttgctactggtactgacgcaaacgggcgtctaaccgaaaatacccttgctatggtcaacgatgcacaaacaggaccaagacaagaagccttagttagtgacaagaatgaattgttcttaccacgtggcaacaatgtcaccatgatgctaccaaagggctggggtgtcctcaacggggcgcagacccaacaggtggctaaatcagccggtgtaaagcattttgccaagggatcagggctaagccatagcgcattgagaaagcttgctgagaaggcgggagccaacccagcacaaagcttcaaagaaatgttcttagacaagctcaaaccaagcggatcgaatttaaagcgtggttctatcggattagcgcaaaattcatctcagcacttcggtaattcttggtctaacgcgatgtggacggtcatcaacaacgcaatcggcggtggtgatggtaaaggtggcactcgtgaagcattcctgagatttgctgagtctacattctctggcgtcccatatgtcatgggtgctatgagtaaggcggctagtgactgttctggtatggtcgcacaagctttaaagcatttcggaattaatgctgggcgttcaactgttgatatgcaacatagttccgccctccaatatcttggtaaaagcattaatcgaactattccgggtgacttggttattttcggtcatgggacaggcgcagccggtcacgtgggtatcgtcaagaatccaagaaccgggacaatgttcaatgaaacaccgccaaaagcgcgtgtcacacgaattgctgatgacatgggtatgggctatggtttctaccgtgtcaaagggttacacaatgcatcaactgctaagaagactgcaaagccagctactaacttaactgcactagcaaaacgcgaacttggtccagccgctttaaagtggattaaggacaagttaggcgatgaaggttcactcggtggcaacatcggtggtgaaggcgtcaagcgttgggctggtacagttaaacgagttcttggtatgttgcacttgtctacttctgattcaatggtcgcaagagtattgcgtcagatccaaactgagtcaggtggtaatcctaacgcaagacaaccagggagtgacccagacggtaacggttctggtccagcattaggacttatgcaaactaagcgagcaacattcgaagcctttaagcgtaaaggctctggcggtatctttaacggacctgccaacatttacgctggcttgaattatgctaagcaccgctatggttctagcttgtcagcattaggcaatggtcgcggttacgcaaagggtggacgtccaaaagcacacactccatttattgcaggtgaacgtggtccagagctaatcactgctgacggtcctgttaaagttgatagtcacgaacaaacaaagcgtaaagtttctgacttagcgcaaatgtttaagtttccaaagattaacagacctacacggtcacacagctcagcgccggtcattaacatcaacctcaacggtcctatctacgggacaagggaggatgctaagcggattgcggaactggtacgccgtgaaattaataaggttctagtaaacataagcgatgaattaggtacggatccatcgctttattagtaaggagttgtttttatttggctaaaaaagaaaagccaaaaaacaagtctaagccccgtaaggggcgcaaaaagactaaggcgcaaattaaagcagaaagaaaaataaaagaaatcaaagataaggctgataaagctcaccgtgcggcaatgaaagccaatgcgacggcaatgaacttttcagcaaaagtctttaacacgaaagatccaaagctgaaagctaaatatactaagaagtttgaagaatacatgaaaaaatatcatgcagacatgaaccgatacaaaaagtatagaaatcagcttaaaccagctaagaccagcaaaaagcgtgttaataaaagcaagaccacggatcaagccgcgatggtcagcaaaattgaacaacataaaaaagaatttacgaatgaaggcaatatggctatttttcctacactcaacgggacagaaagcgatattgtcttttttagccccacaaatacggaatcagaaagcaattcatcaaacattacttcttatgccgttgatcagggggcacctcgtaaagattacgcaagattcaattctaagacggtcactattgacggtcttatttctgacgacattaacggcggtcgcacagcccatgataaatgggtgcagttaagaacgtggcacagtcaccatgaagaattaacgttccgtggtgacatttattacaagcacttgctgatatcacaacttgaccggcaatttaccggtttcaaaaacacgatgcaggtttcaataacttttacatttgttcgagctgctgagatcacgacaagcggcaaaaagaagaatgctaagcggtcgaagtcttctaagacgttggcaggcaacagaaacaagaactacaccgcaataaccatcaagccgggcgataccctgtggggattgtccaaacgctatggtaagtcggtttcttggcttcaaaaggtcaacaagatcaagaatcctaaccggatttatgccggcaacttgatttatgtcaacgataagaagcataaggctaaaagcaagatgcgagttaagtaaggaggggtgaaatgcgtcaatatattccagtgaacattgatgatttgccggacattttcgacatcgaattggctggcgaggtttacacgctaagaattgactataaccccgttgctgactggtataccatcactatttatcagaatggcgaaaccttgctagaacaggagccgcttatacttaatcagctagtcgctattgatattcctgatactcgtttacctcgaattgatatgagagtgatggacgaaactggtaacgcaaaagatgccggcaaggctgagtttggctatgatgttcaaatttacattgatgtgattgatccacttggttcagaagacgaagacccgactatcaaaccactggggtatgaccctgacgaagatagcgatgatttaacggatcaggaggtctcatattgatagttactagcaacccacacatgtggtttgtctgcactaacgataaaggcaaaacccaaaccgtttacaacaacgagcattataagcataattatccgtttacgtttgaagttaactttgctgattcgtctacgccacagcaaaatacggtcactttgtacaacatgaccaaggagcatgcaaatttttatcataagaaattctattgctatgttgcgtttaactggggaccagataagaagattcttgctgagggatttatcgaaaaaatcggcattcctaaccacgatggtacaactgatacctttacaattactttcactgagggcacgaattacagcaatgtagccgctcgcaaattgaaagtaacaaaagaaaagaaggtcaacaaatatgtaacgaagtgggtcaagcaacctgataagacggttactagataccaccattacacagagaccaaagagtacaaacgaggtcctaaaaaaggacagaagtacacggttcgccatcgaacgccatataaagaaaccattaaaggtaagtggcgtaagaaacggattaaaacccgtgctacaaaagtagtcaaagttaataagacgtttcgcaaaggcacggactataagactttgatcaaaggaattgcaagtcaatcaggaatcgtaatttctaagattgacttagcaaagaatccaactttgaaaaagtcatttaccgcaaagggcaaaccattaacactgcttaaacaggtggtcaaaaaaacaggttcaatcatgacctacattcaaggaaagcttgaaatcattaatccaaaaagcacaaagagaacgtggtatgagattgatggccaagacctgttacagccaccaagttacaacgaaagtagcgatgacagctccggtaaaggaacgtgggaaatcatggttccattggttccagacataaccaccaacgtggggattcacatggaaagtaagtatttgaaaggctatttttatgtgaaagccggtcaacatacatttgacatggataaagcacaaacgcaatgttcacttggaaagatttaaggaggtgagtgttatggcacaatcacaaaatgaagaacgtaaggcggctatcaacgcaatgcgcaaatttcaatggggcattatttctggaatggaaaatgcattaattgcaaaagttattgactataacaagaaagatcatacggcggatattttaccgcttgctaattcaagcgacggcgaaacatcagcacaatatctggatattccggttactgaaaattgttacatgttggatgaaatgattgagcgacttaaaccagaatttaaaagaattgattctgaaacgggttcgcatttggttgataagctgcctaaaaagaagcttatgagaaagggcgtcccagtagttgcggtggtattagaccgtgataatgacaactgggaaggtggtagagctgtcaacacttacactccgaatagttcaagggttcatgatgctaatgatgcgattattgttggagttctcggaggtgatgcgaaaaatggctaaggatttattagttaatgagtacggtgatttagttattgaccctactactcacgacttagcaatcgttgaaggaattgacgaaatagcccaaagaataagggctacactgttaattcgctacggtgaaatgcctaatcttgacccagatcaaggcgcagattacagcaatttcattggtaagaattttaacgctcagcttgcatccgctgacatgtctacgaccatcacagaaaaggttccagaggtcaaaacggttaatagtatcacttttaagaaaatgcctagaagaggcttatatgtggcttttagcgcaactgttcaagttggcgatggtcaaccgaaaaacgtagagggaggttttgaacttggcgatagctagtttcggactacacaagcgggggttcttagctcccacatatgaagaaatactggacagtgtagaagatgacttgatgcaacgttttggcaccgatatcgtcctgacaagtaattccaattttggaattattgcccgactgatagcgtggcgcgaaaccttgctaattcaagaactgcaaaaaacttactattctgcttatatcagcacggctactgaaagctcacttgatcggattggtgctaacctagatcttccaaggaaagttgctacaccaagctttgcaaacattcaaatcgtgactgatgacgaatatttgatacaagcaggtgaacagtttgaaaccgatgacggtgttgtgtttgaccttatcaaggacgtaactaccgcaaaagattcaaatggtcagtacattggagtaggagttgtccaatccgttgaaactggtgactttaacaacgttttgcctaacacaatcactattgtttctaatccggacgaagacattattagtgtgacgaatccgcagaaggcagctggcggacaagatgatgaagacgactccacatatagagcgcggctaatcatggaaaacgtggcaaagcctggaccgtcaacagctggtatcaaatcagcattaatgaatttaccaggagtaagacaagtaaacattattgaaaatccgttcgcagacgcggaccaatacggaaatccaccgtattcggttcacgttttttgtttgggcggaaaagaagacgatatagcgagttgcttagcagataaagtagcggctggtatcagtcttactggtagcaaagaagttcaagcaaaagatgcaacaggtgaggttaaaaagatcaattttgattacgcaaccgacaaaccaatttatgcaagggtcaaaattcggacaactgacgaatggaacgccgacgacggtgctgactatgtaaagcaagaaatagctgattacatcaacagtttactgatggacggtaccgtttacctaaccaaaatttatccgtctatctattcaattgagggcgttggtgaggcactcgttgagatcggaactgaccccgaacatttagcagataaagatatacatacacagccgtttgaagccgtctcttgtgacactagaaatattgaggtggtcgtaaatggcatatgagacttctgaacagcttttagctgagatttcagactactggtataagcgacctggtggcaatctttataagctaattgatgcctttaacgagccactagaagggattagtacaaatgcaaataaggtcgagcgctggcgtgctttaaaagacgcccaaggaacaacgctcgacctttttggtgccgacatccagacatatagaccaagtcaagacgacgacaattatcgcttcattattcacgttatggagcttctttcacgggcacagggtactgtaccctcaatcgtgaaaataacgtctagtgcgcttgaatatgaccacggtttcaaaatctggaagacaggtattcgtcacgtagggatgcagataccgtttgatgcggttcaaaacccgcaaatggaaaagtttatgcttaacaacttgcaaaaaatgctggcgatgggttactggcttgacttgataatctttaaagctactacacacgttcacggctatctaggtgccaccacgcaagatagggaccatgacatcaaaacatttgcgtctatctggtgggaaggctacaaagctaccacgtataaccattggtatttttggacagacattaacgagttgcaaaacactacacatgaagaagtggctacttggtgggaaggttggaaagcacaagcaaagcgcatgtcgtacatcggtaccaagcttttaacacatgaatatcaagccttaaaggcaatctaatgaaagaaggtcaaaatggacaaattcaaagacaccattatcaccgatgcagggcgtaaattactcattaatgtcggcgctggtaatggcgaaattgcatatacacgggcggtgctagctggtcaagatgtcagctctatggctgatgaagacattcgaaagcttgccacccttgaaaatcaaaaaatggaggtcaacgtaattgttacacctccacaagacaacacaatcaccgtttcggcttcatttggcaacaaggacttaacggatgacttaacgtttagctcagtcggttggtacgctaaaaacaacaacgataacaaagaaatcttgcttggtgtatcaccgtcaaacggagaacaaacactagcggcaggttcgccagatcaccggtcaacggcttcaattgacattgatttagcaatggctatcagcaatgccgcaaaagttgacttgacggttaacgagattggcgtagctcacatgagcgatgtcaacgcggctattttgaagctcaaagcggagtatgacccgaaaattgagcaagctggcaaggtcaaaggtgcaaagatcaacgacggggcggttgttgaacccgatgatgacggtattcttgacttgatcgttgatagtgaccgcattaaggattttccggcagatttaaaagacctcaatgacctgccaagcgggacatatcggacttcccaaagtgctgctagctttgtcaattaccctaaaatgcaagatggaactactccttttaatatcccaatagtctggaaaaacgcattaatcaaagtagtcaaggatgctaatgctggataccagcttatagtgtccagccaacaaaaatatgcaatccgctattttagtaataatcattggggatattggtttcagcttccgacattatctaataatgacatcatcaaattaattgactccaaggttgacggactaaacatcggcaattacgccactaagacggacttaactagtgtttctaactcagcagtcaaaaaggttaatggcttaacccctgacggaagcggcaacgtaaacgttacctcaaccgttgcccgcggctttgatgctaacgcaaacgctacaactaagatgacggaagaaaacctgcacggcggcaatcagatcttgatggaccagaatgcaggtcaagacatcgttaactgggcaaaaggtcaatttaacacactgaacgggaatatcaataagctcaacgctaaaactgaaattcccggtgttgccaatgcaaatgatttagttggtgacgcttcttcaatcagtacttacaaattaagtaactctggcaatcttaatgtgccggatttctacccagataagcgtggcacgctaatcaacattaattatgatggaaacgctaaaactcaaatttggattccagtaggtaattcaggtggcgactcaattgctttgaggtactgggaaggcaataactatcctaaatggaaaaaacttgcaaccgttcaggatacaaccaacttgcaaaaccagatcaacgacttgaaaaagtcaaatgctgatttgatcggcactgttaactggttgaaggataatgccgcaattgctagaagattcccagctagtcaagaagcgcaagctcaacaatgggaaaatgatcatccaaactactttgcattgatcgaaaaaatagatagaaagaaggtgaaagcatgctagaccacatgatctttgacagactgaaatggttcaacatcagtgacaatactgatagcgtgaccgcaaacggcaagaattgggaagctattcctaaacaagtagtcttaccacaaggggcaaaaattgcgactttttctggtgatggttctgcttctgcacccgatgccataattatgctaaattctgacactactgcgaatgtcattggtaaaattacggactgttacgcagttactggtgtttttaatggaacgggtcaaagcacagaaaataacgctacattaaacttgagctttgatgaagaatacatttttgacgatcatagatatgaagttaattttgtgtcattcggtcttattcgtgaatcagatgttaaaagtacaaaatgggggggtaaaaaccttctacatactgttgcatcaatggttgaacgtgctttctcttcaattaggaaaggagcgaaaacatgctagatcatatgctgtttaataggttgaagtggttcaacattaaagacgatgctgaaagcatagagatagatggtaaaacttggcaagcatttccaaaaaacgttaaaattaatgacactgctactgccttgccaattggaaatataggtcacggcacctacggcgtcataggagtttcaatttcaaattatggaaaaatttatatcatccgaactgatgcaggtcccattgcaattaaatctgatgccgtaatatctgaaaactgggggggaatacctcacttatacgcttgtatcaacggcttaggtcacttttctacccacgtagggaggtggcttaaatgctagatcacatgatttttaacaaattaaaatggtgggactccacgaaccgcccactgatcggtaaaagaatcactgcgtcgcttgatacttaccacacggttaaagcgggatttaactttactgctgcggattatagcaatgtgccggctaaaaccaaggtagaaaatgccttaattgtagcagcttataaatttaatgggtcagctggtaatgcgccaagcggcacatatattttgactgatcaagataattctaaatggttaaaacttgatggctcggaaaaattagggggggtaattagccctctaaccaacttgcgtcaagcgtttagggctactgctagaaaggtggtggctctatgattgaaaagatgatcttcaataaaaatgattatcttatgttccctaaaaaggtcaaaattccccaaggagctcaaataagtaccatttttacggattttccaaatactacttactgttcaatgaacgcagatctggaactggacgtatgcgcttcttcgaaaaacggctatctagttggcagaaatagggatttgccaattatcagtgagagagatagtagcaccgtctatggtcctgtatgggttcgaaaatcggactgtacggaaatcttagggggggtaattagcccgttaatccacctataccaagtacttagagccgccaccagaaaggcggtggctgtatgctagatcacatgaagtttaataaagaagactactaccctacaacaaaaattattgtcggttatgtaaatacagaattaattggcagagcgataacttgcagtaaatataaagtaggatggtctagagagggaatcattgatgcttattatagctattctatcaatagtgattcgattcaatggaataaaccggatgaaataggcggcttagcttctacgggtgaaatcacaggcgttgtggtagatcaacataatattccatattatattgttgacattaatcattggataaataatcctaatactggtgatgggatgtacacaccgcttatcaaagcatcggatatcatgactaagtatttatcaagggaacagttatagtattagtactcattgagtgctttttttatgcaaaaaattaaccttgctcacggggagttcccgtgggctttttatatagaaaggagccaattatggctgacgaaacacaagttgcaccagtagctggcgcacaagaaaacaatgctacacaagaaaacaaggggtttacctattactttagtgatcctgactctgccaacgcagaaatgcatcacgtagtaattacgttgccttatgagttgccagaacttccatggcactggcacattgaaaagccagacgacagcttaaaagatcctgtctgggacttgaaggttaatggctgggtagaaaactccaaggacggtcaagccgcaatcttgcaagaagctacacaaaagattgaagaattggataagaagagcgcagaacttgataagaagaacgccgcacttgaccaagccaacgataagtttgaccaagcaatgaaggccatgcaacaaagccaacaagtccaaacacaacaatccttagcattgacccaaggcttgcaaaaggtcgcagaagggcaagaacaagccaacaaggttatggcttcaatgcaacaaattctggttggcatgcaagcagatcaagctaagactgctacaccaaccagtgacactaagccagcagaaaacactaacaagcaagaaaacggaggtaactaattatgactgatttaaacgctttatttttacaaatgtgggtacttgactatcaaatggggcttttccaaaagccttactttcaaggcttagttcaacaaggcttattggacgcagcaggttacaagaaagtcacaggtgaagactatgttgcaccgcaagctcaacctgcaccacaagcttagtcgctggaatttcatcaaaacagggctgttaatctcggcattggcggtctgctttctgatagatcgaacctactttttttacccaccaagtctagcacctgcgtggaataacgtctgggtcgatagtatcggcttgatggcaggactaattttgattttgtgcggtgtttttgatattcgggtacagttaatcatcaaagttggtctaggcgtgtcagtagcattcttgacagttctgctggttgcggaaagctttcacatcgttggagccggctatttcagattccaccctgctattgtttttgagatctacgcaatcattaaccttatgcagattgcttatgagtatgacccacaggactgagaaaggagctgatacacttgcaaggtcttaaagacgtacttagtgtactagctccattcctgttggggttgtttacttcatatctaagtgataagagaaatacgagacaagacagccatagctttttagtagacgactatgaggctgtagttaaagaaaataaggaattacgcagggaaaacgaaaaattgcgaaaggagttatccgaaaatgaaaccaaacactagaattttagactacaccactcttgtgcaagatggtgttttaaccttggacgatgtgccacaagacatcaaaggtgcagttaccaagtgggtgcgctatttgtcaggtatccaagacgaaaccatggtcaaggacccagacgcaaccaagccagcggtagaggataagccagtaggctacacccctgctaagacgggcgacatcactagcggcgtacttactactaagaaggtgacccaataatgaatctcactgaattaactgcttacacacaaatagttgttttggctatcgtggctatctgtgtcggtatctctactagtatcgaatactttgccaaaaagtcggctaaaccacttccaaagcaagtaatgaccattgatgagattgctaagtttgtcgtaagcgaagccgcaacgctggatatttctggtgccgaaaagaaggtcaaggctgtacaagccttacttgatcaagccaagcaagaaaacaagccagtgaccgaaacagtcgccaagggtgctgtccaacatgcttatgaccaaatgacagcggaccaagccaaacaagaggatacacaagataccaacgcccaaccaattggctttgtatcaggtgacgacaatgatgacaagaactaagacgtataacgagtacgtttttgaatcgtttgacaaatcgtttgaaaaccaaacgaaaggcggtgaaaaagatgtcaagctcaatcgtatcaaagaaaagctatggtgtggacgtagccagcttccagacagaaaacgttagctacacgggtgcgaaatttgctatcgtaaagcttacgcaaggtactggatacatcaacccgaaagcaaaagcgcaaattaaatctgcaaaggctcatggcttgctaaccatgggctatttctatgccaaccattccggctcggtcacacgagcacgggcagaagctaagtatgccgttgaaaaggctaaggcttacggagtcccagctggtagctacatcgctgacgactgggagcagggcagcggcaacgacgtcaacggctctgtcggttcaaacaccgatgctgtcatagcagctatgcaagtgatcaaggaagcagggtataagccacttgtctatgctggcgcttatgttttgcgtaaccggctcaacacagctcgaattgtaaagtcattcggaacttgtttatgggtagcttcatataaagtcatgggtcgtcaagattccgctgactttaattacttcccatccatggacggtgttgcaatctggcaatttaccgataactataaggggtataacgttgacggtaatatctgcttgatcgatttaaaggctaattcaggtagttctaagcccaaatcaacgaacaagagcgtagaatcgctctctctgcatcccgttgtgaagtggaatattggtgctgtcgcagtagtatctaattcaaaaggtgcttatgtctacaccagttcaaagttagacaagcgggaatctgacaagctaaaaccgtgtggctccatgtggcaggtgtttggcttggaaaatggcgctgtgaaggttggcaagaaccaatactttgacggtcgtgccgtttacgtaaaggctaaccctatcgcatataacgactcaaaacacgctgtcgctaagattgttctgcctcacacccacgccctggacgcaccaaaggctgacgcaggcaaggtctacggcttgaagcttaactcaaaagtcgagatccagggaagagtcggacgctttttaaagattaaagagctacacaaaggcaagcaggtatatgtgacgggcaaccgtgcgtatatcgtgctgtaaactttacaaagatggatagatagccataatgagctataatttatccgtaattttatccataataaaaaagaaaaggggttgtaaaagctccaaatgtcgtgcataaagccacctcgggggattgttcctctggggtggcttttttgcgttatattttaatttttattgcaaatgtagatacaaaagtatatactaaataaaaaggtttaattaagacttgtaaggagatttataacaatgtgcaatgtggaattgaaacaatggggcaattcactagccgtacgactgcctaaaactattttaagcaaagccggcatcaatgaattaccgaccaaatttgatgtaacagttaacaaaaataatgaaatcgttttgaaaaaacaaaaagagcctgaaagcttaaaagagcttttcaaaggctttgactataaaaaatattggagcgactgggaaaaagaaaatcctggcaagtccaaagaagaggactggggcggaccagttgggcgcgaagtcttttaatttagaagtccttattagaagggaggtgataatttgaacagcagaaaagacttccatcaaggtgatgttatcatgatgaactttgacccaaccaagggacatgaacaagcgggctatcgtccagcgcttgtcgtgtcaaacgatgatttcaatatgatgtgtggaggagtgatcaaagtggttgctattactactaacgaaaaagaatttccactacacgttgaaattccagaaggtttgccagttcacggcagggtagagctggatcatgaacgttcaattgattctcggtcgaaagccagagaatgtaagtatgtatgcagtgtaccgtctgaatttttagatgaaattctccgaaaacttgcattaacttataaaaaaagccactagggagtaacactagtggcaaattaaagcttatatactgtctatatggttagattcagtatataagcttttttggtgcttgtaaagtcgcctgattttatagatagctttaaggcggtccaaatcaaacgctaaaaaattggcgtgcagatcctgaaaagttaaaaaatagcatgggagagggtacacctactagctaagttgcatgatcttagaaaactgccaaaatgagaataaataatgtgctataataaattttggttgcaatgcaggattttcaagtcgatcggcctagcaaaaaccgctcacagcttggctgtgggcggtttggtagttatcaaaaatctactgaaaatctactgaatacccagcagatttaatgtgatctgttgggacaaatcaaaacgaaaaggactataagttaacgtatgagacgtgatagtacaagaatttatattgacatcaacggtaaataaaaatggctaaaaataaaaaaaatagtgtaagtacaattttacttagagttgctgctatcatattattgcttgttggtattgctttgatatttaacaaacagatcagtgatcaattaattcatcataatcaacaatctactttaagtggaataaatagaaagacaattgaagaaaacaaaaagaaaaaaggaatgtatgattttagtaaagttaagtctttaggcattgcacaagcagcaagatcacaagtgaaaaagacttctggtgcgattggtgcgttagctattcccgatgttaatatgtatttaccgattatgttggggatgagtgatgatgcaatgtcgactggtggcggcacgatgcgagccgaccaagtaatgggtaagggaaattatcctcttgcaggtcactacatgacagcaaaaggtattcttttctcaccacttgaagatgttaaaaaaggtgagttagtttatttaactaatcttaacaaagtatatgtctatcgaatttatatgaaaaagattgttgatccaactgcggtttggctagtcgataatactaagaagaatattgtaactttgattacttgtgctgatggcggtaagaatcgttgggcaattcggggtaatctgattaaaactgaaaaggctaacaacaataatcttaaggtttttaaattaaaataaaaatttacaatctttaatcagatttagatttgcgataaaattataaatagattttgtaataaagacactcaacaatgagtgccttttcgttttgatgagagaacataaggtgtttgataattaatgaaatggcaagaaagaacagctgatgaattagcaccagacttgattgagaaatatcaactaggtcccattgcagccaaactttttgcattgcggggtattaatacagacgaaaaacttgatttttggtttaatgcaacagaagaaaatctggctgatccagcgttaatgcatgacatggataaggcaattaaccgaattaatcaagcaattgatagcggcgaaaagattacaatttatggcgattatgatgctgatggaattactgcaacgactattatgactgaaaccctaagcattttgggcgctgatgttcattattttattcctaatcgcttcaatgatgggtatggtcctaatatggaccgctatcaagatattgtagctgatggaaccagattgattatcactgttgataatggtgttactggggtcgaggaagtcaaatatgctcaagaacataatgttgatgtaatcattacagatcatcatacttttcaagaaaagaaaccggcagcttatgctactgttcattgtaattatcctggccaaaaatatccttttgatgattattgtggtgccggagtagcttacacgatttgtcgtggtctaatgcaggatactatgcctgagctgctagatttggctatgatcggaactattggcgatatggttaaggtgaccggagaggggcatattatcgttaagcgtggtttagaaatgcttaatcagacagatcgtcctggcttgcgcgctctaatcaaaaatgctggtttgactttaggcagtattaatgaaactgatgtcggctttaatattgctcctcgattaaatgctgtaggtcgattagataatgccaacttggcagttgagcttttgctaagtgatgatgaccttgaggcccaaaaaattgcagataagatcgaagaattaaacaataaacggaaagaattaaccaccgaagtctatgacaaatgtatgacgttaattcataaaaatagctggcaaaaacaaaatactttggttttatatgaccctgaatttcacgaaggtgtgttaggtttagtagctaataagatcgttgaaaagacacataaacccacgattgttttgactaaaaatgatgcaggtgaggttaaaggctcaggtaggtcctttgctggtttcaacttgtttgatgctttaaatccgatcaaggatcaatatttaaccaaatttggtggccatgattttgcctgtggtttatcattagaagaaaatcagattgcgccattacgggaaaaatttgaagatgactttcatgttgaaggtggtcttgagactaaaaaatatgacatggaattgcctatgcagggcttaactccgcagacactagcacaaatcaatcaagtaggtccattttggacaggtgacacgcagccaatctttagtatctctaatccaacaatcactcatttctttaaaatgggtaaagataagaatcatgtcaaatttacggttgctaaaaaaggcggtaacttatcagttattggatttaataaaggctttttgaataataatcttttgccgtttatttctcaaatttttgttcaattatcattaaatacttatcgaaatcaagtttctttacaaggaatcatgaccggactagcttttgcttcaccaaaattggcagtgccaacgccagttgttgacttacgccaagagaaatatgttatgggtttcgcggaccgctacctgttatttgatcaaaaaaatattccgattgttcgcaaccgactacagatcgatgaagacaagatctctttagttaaagattatgatcaaactggtgaaacagttgcattattagatgtgccacgcaatcagattgaattaaatgctgcattggagaaagattatcaacaaatctatttacgctttttgcttgatcaattgcctgttgaacaaattcccgctaaaaattattttggtgctgttttaaaatatatttatagtcaccctacgttaaagccagcagattaccgtacagttgcaccttatttgggactagattatgatagtgtgcttttcattttacgagttttctttgaattaggctttgtaaaattggatgaaggtaaattggtaggagagccttctcctaaaaaacagccgctgacagcttctaaatatttaatgggaacttcttctcagattaaatttgttaatcaactaagaactatgcctagtcaacgtttgattacatatgttaataatttgacaaataaatagataactattctgttttcagtgcttttatcgttaaaatttgttaaaatatactggtcaaaagcgtttgaacacaaacacagagcattttggaggttatgcttcttatggcagttgattttagtaaatatattgcaagtgttaaggattttcctaacaaaggcattgtttttcgcgatattacaccaattttgcaagatggtgaattgtatcgtgccgctactcatgaattagcggaatatgcaaagagtaaaaaagcagatgtaattgttgggcctgaagcacgtggttttattgtaggttgtccagtagctactgagttaggtttaggttttgtacctgcaagaaagccacataagttaccaagagaagttgaacgtgcttcctatgatttggaatatggttcaaacagtttggaaatgcacaaggatgcgattaaacctggacaaagagtggttgtctgtgatgacttgatggctaccgcaggtactttaagagcttctaaagagctaattgaaaaccttggtggtaagttagttggtgccgcattctacatcgaattgccagatttacacggtagagataaattacctgatgttgatatttattcacttgttcaatatcatggtgcttaaaatagaataaataaaaagagggaattaaatcaatttgaactgagacctaaaagttagacacttttaggtctttttctacgtaaagtcaagcataataagaagtttggcttcattttttgtttaaatttcaacttaaacatcttttagtgtcgatttatttttttagttagacacgacaaataagcccagatccatatctgatttttgggcttagcgttataatgtacttgatcaattaattacgactaaagtctttttgattatgtgtggctacgttgtaatcatatggttgatcattgataatcagggcataaatggttctgattagtttatgaattgaagcaatagctatctttttgaaccctttggtttgagaggatagctttttgctttcataataatctgctatatgacacggatttgtcttagctgcattatcaatttgtccaatagctcgataaagcaacttacgtgcgactgcattgccatgtttagtaatacttaaattagagtccatttctcctgactgatatctgcctggatcaattccgataaaagcattgattttattaggattactaaatctgcgtaaatctcctaactctgctaaaactctgacagcagtggtctgtgcaaagcctggaatgctttctaggttttctaaatcatgattaggcaaagacttcgctaacttaaccattcttgcgattaaattttctctttgatcacttaaattaagcaatctgtgtgcataatactgcacttgctcgacttctatgctagagcaagatacaacttgataagcttgataagctaattcaattaatttatctgcagtccttagagcgtgtttaaaagcaatcccctttaagctcattaaccagttaataagctgttttttatcttctcttcttactaagtcacaatgaggatatcgcacaactatttgccagtaatttttacctttagcagaagaaaataaattttcaatttcaggaaaagtcgattgtagagcttggtgaagtcgatttttagctattaccaagtcacttgtcagctggtcatagaagcggctcaaagcattaagctgcttataagtttgggattcgctttgattaaccggatggcgataaagtctttgaattaaagctaaatgataagcatcagttttatcggtcttgttgtagcgtagccccatattcatctcttttttggctttaagcggattaataacaacatattcatagccgtagtcttcaagaaaagcctgcagtctgcgtgaataaacaccggtagcttcaaaaataatttgcggatgtttagaaaaagcggttaattcatgaagcaattgaataaaaccaggacgattattagtaatggttagttcatttttgctttcaccaattagttcacaaacagtagaagtagacttgcttacatcaattccaaaagtaacttgcataataaaaacctccaaaacttagtagtaaaacgtatttacttaagaaatcagatctaattttctaaactcgacatctagtgtccacattcttcgaagagactattgaaaacttaagtaaaactgccagtttattatgcgacatcaagtgtctaaagacctcagggcatatcgttttaccactactttaattctacaaaagaataaaaatagtgaatcaattatcccgtcggataactaattcactatttagcttagaatgtttattatttgttaccgattaatttaaattttgaccatggtttaataaagtcgagcaggaataattcgtctgatctaatagaaccgactttgttcatccttgactccttatgaggttcaaggacaatttgtagttcatttttgtaatgaccaaagttgtcgttaccaatgataatatctccgcgttggaattctacattgttgtcgtgtactggattaggaatatctgcataagttacacggggcatggttgaacgaattacatccttagtgatatcaccacgacggaaatgttgaggcgcttctacgatagttttctcaatcttattaacatcagtaacgtagtttacgtgcaacatcaattgatagcgattaactttagataaggcttttaactcggcttcactggcataagcattaccgatgattacatcatcaatcaacccagaagcccagagatgcattgcttgcacatcaattggtaaattacggtcttgctcaagcgttggtaaaccatcttccacgttccaaggtcccatttgacctacttgacttgagacaaaagcggctgaatgaatgccaaactttttgaagcgttcagaacaagcgataaagaagtcgtaaggtaagccagtaccgcgttgaggataaaaattgtgacagccataaataaacggtgtattagcttggtaagaaataatattgttaagatagtcaacattattactcatgttgagttcaatgattagaccatatgggttgtaagaaagcattgcttcaattgcaccatcaaatgttgtgtcaagacggatgcctgctgcaccaatatcagcaaaaaatttcaggtcatcatagctgacacctagttgtttgaagattgcaggattaacatctaaaaaagtttgaaatcccaatttattgccatattcaatgatttttttatacttagctttggtttcttcagggctgccttgtacttcaagcatactcatgaagatacgagaaaagccatatttgtgagctaagtccagatagtgagcgttgccttcaaatttgctgtggcctggataaattgacagacctaaagatctcattgtcataatagtacctcatttttgataattgtctataccaattatatgatattttttattgtaggtctagtccaaagtgaccgagatagtttatattttggtagggtgtctcgctacgtttttaattaaacaggtgttatatttaaagtacagggtatgtgttaagaaggagaaattaagatggataattttgatcaagaatctggtcaacagcaatatgctaatgattcaggattaaatgttttttagcaaaatatatggttatatggccttagcggttttcgtttcagcaattagtgcttatttgacaatgacggtttttgcgggacctatctctgcctttattgcacaacaccaattgtttacggcgttacctttgcttttattgcaggtgcatatagtggacaaaatattgcttcagcatttgtagcttcggcaaccgtctttgtaacaatggcgattttaggaacaattaccaaaaaagatttgagtcgaatagggtcttatgcttctgctgcgttaattgggttgattgtagccatgttagctaatttgtttttacataatccaatcattgactacgttttttcgattattgctgtgattatatttactattttaactgcgtgggatgcacaaagaatgaaagatatttatttacaatatggtgatgatctttcaactaatgggcttgcagttttaggtgctttgcaattatatcttgattttgttaacttgtttttacaatttttggatatttttggtgcaaatgaagataagtaattaaactagtgagactgtaaaatagtttgtgtaaggatgaatgattccttaaatttatttctttaaacattagaaaaaggagttcctttctcgtatgattggtttgaacaaaaaaacacatacagaaagaagaactccttcatgaatgattttaccaaagattttgctcaagctctattcaatccagacaaaataaatgatttattgcgcaaagagctacaacaggctgttaataacttgttagaagctgaattgactgcctttctgggctatgatccctatgccagaaatggctggaatactggcaactctagaaatggtgcttatttccgcaaagttgatacgcaatttggcccaattgaagtgcaagtgcctcgggatcgcaacggtcaatttcatcagcacacgctgcctggctacaagcagcactcggatatcttggaaagcatgattatcaagctttactccaagggcgtgaccaccagggaaatagccgatctaattgaaaagatgtatggcagccattacagtccagctcaggtatcaaatatttccaagcagatgattccaaaggttgaggcttaccacaaacgcaagctaagcgacaagtttttctgcgtctatttggatgcgacataccttcctttgcgccgagaaacatttgagcgtgaagcagtctatattgccattggcatcaagcctaatgggcacaaggaggtcattgactactgcattgcacctagcgagaacattgaagtctggacagatatgcttcaaaacatgaaatcccgaggcttgaagcaagttgagctctttctttctgatggtgttgttggcatgaaagcggccttgaccaggacttatcctaaagctcattttcaacgctgcttggttcatgtcatgcgcaatatctgcgctaaagtacgcgtcgacgatcgtgaaaagatcatgaacgaattcaaacaggtgcatcaacagacaaacaaagaagaagccacagctgtcctgcatgacttctataccaaatggggcaaggtttacagccatgttatcagaagcttgaaagacatagaaccagatctgctggtcttttataactatcccaagcagatcagagcttcaatttattcgactaacatgattgaatcatttaacaatgtgatcaagcgcaaagctaagcctaaggcagagtttccaactgaacagtcgcttgatgcttttattggcattcaggcaatgagctacaatgactgttatttcaatcgaattcataaaggctttggtcaggttcaggacaccttagaatcctactttgattaaataaataattaaaaaatcaatttacgagaaagaactatttacacaaaagatttgacagtttcaaactagtttctaataaacgtaggaacacttcatatataaacgtatactatataaatatagtgacatattaagggagtgtttttatgaaaagatgcaagaattgggttgtgactattgttgcatttctgatgttagtgggagaaatcagtgttctgcctgcaaatttgcaggggtcgacatcagttgttaatgcagctattcatcacagaaggagaaagcatcaatatcgtgataaaactaagatttataccagtaattacagaattgttgataataaacgatcaaaaatctttcacgtaatgcgcggtcataattatcgaatgaatcgtgaaaatgcagttttcttcaagagtaaagcagcagcacgtgcagcaggatatcgtgaatcaaaaagataaattaaaagacttctaagagttcaaagttcctagaagtcttttaatttataaaatttatggtaataatatacctgtttttcatcacaggttggtaaattaagtcgattattatggcagcaataatcgctacaattacagtaattgctaagttttgaatggaaatctggaccattgcccaaccacaaagagctaagataaaggtcaatagaacatctgcaatttgaacactaccaaccaacttggatgggtaatcttgccaaaagtacttacgagttctagtaatcaaaacaatcaacattgcgctaagaactaggtatacgtaaaccatagtagaaacagcaccgtgactccaaccgtgtgtgtttaagaaccaaacaaacccaataccaattaaagtccaaccagcagctagtgaaaaggcgatcttagcaagcttagccatattccagttttctggcttataagtaatgtgagtcctgtcagttccaatcatcatcgtaaccatattgttcataatggtatagataaccattgcattcaaggccattgggatgtagtcaaagaaaagatagccaaaagttaacagcatcgttaattcagcagttctagcaagcttggttagtgaccaagtagtcattctttggtatacgcgatgtccagcgtctaaaattttaacaattgagcctagaccatcgtctagtaataccattttacccgaacgcttagctacgtcagcagcatttgaaactgcgattcctacttcagcttgttttaatgcaggcgcgtcgttaactccgtcacctgtcatccctacgatatagcctttttcttggaaaagctttaccatcttgagtttatcttctggtaaaacatcagcaataccggccaaatcattaatatcagtattttcattgaaatcgtgaatcgaaattactttaccagttaaatcaacttgttctgccactgcagcagcggtcttttgattgtcaccagttaacataattgggcgaacgccacgtttcttgagttcagccaaagctgctttagagtctgttctaactttatcttgtaagatgaagacaccagctaacttatcgtcaatcaagactgccactgagcgtcctgccttgaaattaattccagaaatttcttcatcggcatgtttatcgatcaaagataattgcttaaatgaaccaagctttacattatgtccagcaacatcagccatagaataaccagtgtcagaagtaaatggagtaaagttttcagcattcatgactggaatgttattttctactaagtattcatcgattgctgtatcgataataccagcattacgtttatcagttgcggctccagctaaagcaagcacgtctttgtcaggcaagtcacttagatcagtccaagcggctacggcagttttgttttccgtaattgttccagtcttatcaagtaaaagcaagttcaagttagctgcgtcctgaattccagttaggtcagaagtcaggactccttctttacttaagcgggttgcttcaaatgagttggataaagcaaaagttgatggcattgctacaggaattgaagcaataaacatcattgccaggaatggcaacatattaataaaggtattgaaattaccgcctttgaagaaggaggcgataataataactaaggttaaaacaccatctagtaagcaaaggtagtagataatcttagtcaaaagttgttgtaagtgaccaggagcagcggaattgttgatcaaattaatcgtcttaccgcttctagaatctttacctgtagcagtaacaacagctaggccatcaccttcaacaactgtagtaccggcaaaggcggtgtcatcaattgctttcttaactggtttagattcacctgtaattgagctttcatcacaagctaagttaccgtcaacaattttaacatctgctgcgagtacgtccccgcgtttaagtgagattaaatcgcctttaactagttgtttagaatcaagtttgatccacttgccatcgcgttcaactgatacagtaggagtcaacttgtgtgaaatattatttaaaactcgtcttgattgctttttcttagatgcaccgttaaatgcagcaaataaaagcatcaacaacacgaataatgattggacccatttgcccaagatacattctagaattaaagcagcttctagaatccaagcggataggttccataacttagacaagaactctttaaagaaattgtattcaggctctggtacttcatttaagccatcttcttttaagcgcttgtctgcttcggcttgagttaagccgtgaaatttatcagacattattttccctccaaatctaccttaataaggtagcacagatattgctatgaataaaatactaaaatacaatataagatattaaatattttaatatcactatcaattgaaataaaaaaaggataaataatatgaatctaaaacagttacgttattttctagttgtagcagaagaaaagcagattacagcagctgctaagcgcttgtatattgcacagccaccattaagctatcaattaaaacaattagagaaagagttgggcgcgcaattatttaaaagaacggcacatggtattgagctaactgatgtgggacaaatttttcaaagctatgccaatgaaattatttctctagctcaaaatgctgaaaaccaagtacataagactatttccggtgaattgggaacgattgcaattggaatggcatcttcctcaacgggcttgataccaatgaattcttttaatgaattacgaaaatattatccggaaatttcttttgatatttatgaagataatacttatggcatcctggataaattagaaaaaaagacaatcgatctaggcattgtacgaacgccttacaaccagacaggtttaaatactaagactttaacaactgaaaaaatgatggctattagtgtagacccagattttcagccaaaaaaagaattacgcattaaagatctagcagatcagccattgattatttatcgtcgctttgaggatatttttaatcaaacttttgcacatcatgggcttaaaccattttatgcggttaagtgtgatgattcacggacagcaattacttgggccaagagaaaaatgggagtagcgctagtaccagaatcaattgcgacaacttatgcccaagaaaatatgatcgcaattaaacatgctaattggataacacatttgcagctggtttggcgtaaagatcatcaagttacacctttaatgaaaaaaatcattgctgcaatatgataatactgtaacttttacctaattgatccataataaatgtaaacgggtacaataattaatagaaggtggttgaatgtcgagtccgattcatgtttattcagaaattggtaagttaaaaacggtgatgttacatcgaccgggaaaagaactagaaaatctagccccagatattttgcatcgaatgttgattgacgatattccttatctgaagattgcccaagaagaacatgatgcttttgcgcatgtattgaggcagcaggggatcaaagtattatatcttgaggatttattagcagaatctttaacagatgagaaagttcgtcgggcattcttagatcagttactggatgaatcaagtattaaaaaacaggatcctttgcatcaattattgctgaactatctccaagaattgctaactaaggaaatggtaaaaacggtgattgctggaattagaaaaagtgcgattcataattctaccccatctttagcagatttggctgaggacccagattaccctttttatcttgatccaatgccaaatgtatattttactcgagatcaacaggctgcaattggttcagggatgaccattaaccggatgactttcagagctagacgacgtgaatcattatttatggaaacaattttgaaaaatcatcctgatttcaagaacgcaactattccagtttggcgtgaccgttatcatcatggtcgccttgagggcggggatgaactagttctaaataaccatgtgttagctgtaggtatttcacaacgcacttctgcaactgcaattactgacttagctcataatttatttgatcattcaagttatgatacgattttagcgattaagattccgcacaatcatgctatgatgcaccttgatacagtttttacaatgattaattataatcaatttacggttcatccctttattttagataaagccggcaaaattgatatttatgttctacagcccgatgatcacaacggtgtaaaaatcacagaaaagaatgatttggtgcaggttttgaaagaaaacttacatttaagcgaattggatttaattccaactggtggtggtgatccaattgccgcaccacgtgaacaatggaatgacggctcaaataccttggcaattgcaccaggtgaagtcgttacttatgatcgtaattatgtatccaatgatttgctaagaaaacatggcatcatcgttcatgagattcggtctagtgaactctcacgtggtcgtggcggtcctagatgtatgtcgtgtccgttgattcgtgaagatttataagaggcaaaaaatgaaatatttacaaaatgtttttcaaggtagaagttttctcgattgtaaagactatactccagctgaaatttcatatttaattgattttgcattacatttaaaagaacttaaaaaagagcatatcccacatgaatatctgaaaggtaaaaatattgcactactttttgaaaaagcctcaactaggacgcgatctgcttttgtagtagcttgtaatgatttaggtgctcatccagaatatctaggcgcaagcgagatccacttaggtaaaaaagaaagcgtcaaggatacggctaaagtcctaggctcaatgtatgatggaattgaatatcgcggttttgctcaagaagatgtagaagagctggctaaatattctggcgttcctgtttggaagtgggtgatggccgcgataatgttgccgacagtcttttagtttgtggctcaatgttaggtgttaatgtacatattgttacacccaagcctttgtttacacatcctgatgtacaaaaaattgctcaaaattttgcccaagattcaggttcaaaaaatttgatcacagatgatattgctcaaggcgttaaaggagccaatgttgtttataccgatgtttgggtttcgatgggtgaaaatgattggtctgaacgaattaaattattaaagccatatacggtcacaatgaaaatgatgcaaatgactggtacaccagatgaccaattgatctttatgcattgtttgacagcttttcatgatcgaacaactcaggtgggagaagaaatctatgaaaaatatggcttaaatgagatggaagtaactgatgaggtctttaattcaaagtatgcttggcaatttacagaagctgaaaatcgattgcattcaattaaagcagtgatggcggctactttaggaaatttatttattccgattgcctgtggcggtggtggcatccttgttattgtgaaagatgggcatctcagaggtgttgccggcgtaattcataaagatttttccgctgctaaaatggcagaagatatcaacgctgatgaattagtaattctaacaacggtggatcatgcatttttgaattatggcaaagaaaatcaacaagcaattggtaaaataaaagttgaacagctcaaacaatatctagcagcaggttatttcgcagctgggagtatgaagcctaagatagaagctgcaattgaatttgtagaaaaaacaggtaatttagcaattatcacctctttgagcaatgccaacaaactagcagacggagtcggcacaatcatttataattaactgggtgataaaaatgaatatttttaatgaaggaaaaaagcaggatattgcccaagttttagcagctaaagataggcgagtagctgtacaacataagatttttaataagtatcctaatcaaactctagtcgacattaatatgaatatcccaggaccaatcaagaataatcgctatttaactaaaatgtttatgttgggtatcaatgagctggaaaatgcttggactaacctaggttatcattttaaattggtgacacagcttaatgatgatagtggctgtgaaaacttttatgtattatctttgtcaattgaaaaagtaaagcgctcaacaattgattttgagaatcagatatcattgggacgtctctttgatgcagacgtgttggtaaaaaataaacaagctgcaatttcacgcagagatttgggcaggcagccacgtaagtgctttttatgtgatcgccctgctaaagaatgtgctcgcagccggagacattcagtggaacagatgcaggcatttatctctcagctttatcaagaatacgttgcgtaaaataaaccgggattttatgattccggtttatttttatgaaaaatctagttaaaaatttaaaaaatgaactaaaatagtaatgaataaatttatagatgtacgtataggaataagcatggaattaaagaaaaataagaataatttaaagcaaattacggcattaattcaatatgcatttttgaaaaataatgatttgactaaagacgaaaattttatgagtcgttatgatcatagtacaggttatggctattttgataaggaaaaattagctagctatattatggttaatcgatttaaaagtgatgtttttgggcatcatttaccgatggctggaataggttatgtagcttcatatcctgagtatcgtggccaaggtcatatttcccaattaatgaaagaaattttgcatgacttacataggcaagatattccgtttgctaacctggcaccattttcggagagcttttatcgccagtacgggtttagcaatagtatttatcaaaaagaatatcgctttgatggaagcgcattgcgtagttttaaattaccacgttctggtcatatagtgcgtggcaagtgggacaatttagctgttcaaaatggtgtgattcaactttatgaacgtcaactgcatactgatgatgaacgtaacacggttgtacgtgaggcatggtggtggaatagacttgattcttattatcatcaccgcaatgtagccgtttattttgacgcggatgagcggccaattagttacttgatttatcgcattagagacaatacttttttagctgatgaaatgtacgcaattacgccgcagggattactgagtatgtttggttttatgggttcgcacgcgggcagtgttaagcaatttaaaatgagcgtaccagagaaatcgttacgagctgaactttttcctgaacaaaacgaactccaagttgatttgcgtccttatatgatgagtcgaattattgattttgaaaaagttttggcttgtatgcggccaatgcaagaaggtgattttaatctggaagtcaatagcgatgaacagtgtccttggaatattggagtttggcaattaagtaatcatggacgtaaggtagcggtagaacgtaaggaagatgcattggttgatttttcgggatcaattaccgcgtggacccaggtgctattaggtagactaaccatgaatgctgctgttaaactaggattaattacagattaccgcatcaaaaaattagatttcgttaaaggcgatgtatcattttatgattatttttagttgtgaggttaaaaaatgagtaaagaaaagaaactcaatttaataaaattatttggcattgtagttagtggtttgaatttgatcttttttgccttgatggcacttaataagcatgaagatactaaggataaaagaagagtagcagaagaaggacacgcaccgctggatgaaaaataaaatgacggaattaaagattgcatattttgaccaattaggtcgtaaggaattagatcaggcagtgcagcattttgtgttaaaacatcctaatgtagatgtaaaactacttgcgactagtcatgatggtgcttttgcaaaactgaatgaagatgaagcagacatagcaatcaatgatttgcgtgacgagaatcttaactttgatgaaacagaattgactcaagctggtgtaatggcaattttgcccaagggaatgtatcctaatggcattcaaatgattgaaaaagacgagctcaatgatatgacttgttttattgtggctaaacctgaagaagaggttagtgagctacatttatttaaagatttgtatcaaattggcagtcaattcatcgcttctaactcggtcgaagaagcagcactgttggtcgcctctaggtctggctattttattttaaatgagaatacggctaggttaattaatactacagatttgcagccacttttcttgcttgatcatggtcagttaataaagcaaaagataatggctttttataagtcaaattcagcgttaagtagtgagtttataaagctattgcagcaagaatattaatctgtaaagttaaaaatatcttgtctaagtactataagatactgtaaaatatattatgaaagcggactcatatattttacattctggagatgatttttatgctaaaaagaactttgttacctttaacatcaatggtacttgttttaggattaactggtttggctagtcaagttgagactgttgatgcttcaacttatggtaatggtgtacaggttactattccaaaaaagatgcagggtacttggtactcttatgatcgtaatgcacataatggcacaaagatcacctttactgaacatactgttaatggcaaaccaatatttacccaggaggcttcgacaattagtgattacttcaatggtagaattgctaaccagaagaactttgataaggtaacgcaaaactggatgtctggtaaaactaccaaaatgaagaatgatacattctatgagattgatccgtggattacttttgaaaattggagtctttatcgagtggtaccacaaaccattaatggtaaaaagcataacgtgctggtttattctagtagatatgatggtggtaactacttcagaagcaagaaattagctaaaaaatgaaggactacaagtttaagaaagttaattacacgttatagttttgtgacatcccttaactaagggatgttttttactaatagacgcgataaaatttagtataataatgacaaaattaattcttggaggagaagttatgaaattaaaacaaacaccaattttgcgtttatataaactagaaactaataaagaggatcatgcaaagttcgttaaggcagggcaacataatatgcttacttctcaagaaaacgaaccaggcacattgtttatgcagacaagtcatgacgaagaaactactaattttgtagtagaatgctatcaagacgaagcaagttatgatactcatgctaattcaaagcaatttaaggattttactgacgttgctaaagatattttaactagtcgagtaaaggtagaattgtttccggaatttatttctacaaaggcagaaaaactagcagttaccggatcaaatgattatgttatttatctgactgaaattggtgtttctttaggtaagggcgatgagtttgctcatgctgtaatgaaagaaatgaaaacggcagtcgaagaagaaaaagatattttggcaatgattgcaggaactgttgccgatcaaccaaatgaatggttagctattgaagtttatcgtaataatgaagcttacaagcagcacttggaaactaagaacttcaaagagtatttgaataatacaaaatattgtgttgaaagtaagagtttacgtaagttgcaaccagatgtaattgttgaccaaggtgcaattttctaccaaccataaagaataagacgaaaagaagaccaggctatgtggagtacataacctggtctttctagttagaggggaaaagatttattaacatatattattctggtttttagtggcgatgttttacctttgctactgctggtttattaattaatactgagctgatggccattaaaccaagcgttaaaaatgatccaccaattaagagtagtttaatcaaggttctcattcctttcatcttaattgatcttataatagcgaaataatattaagaatttatatgtaaaacctaatggattagttaagaaaataaaactagaaaaaaggctggttagcacgtaaaatagaaatagagtcaaagtctagtgcaactgcgcataaaataaagcagtatcgatgggatgctgcttgttttggttaaaaaatagagaatatgcttgtagcccttttcgtaaatagcgttaatgttgtaaaatggaaagtgcattaagtttattaatgagaaaattgatgtattattgcaaaatagtccgtaatggccctttttgttgtgaaaaaattaaaagaatataggattggaaatgccaggaatagtagagcaaacattattagaacaacaaaatattgatttaaatgaaatggtaacaatgaatcaaatgattgatcaattgttgcctaatgcaagtaaagaattacaacaaaaactaaagattaaaatttataactttgtgcgtacacgtaaacaaccaagtattactgtgcgaagaagaaaatattttaagccggctgttgctaaattaattattggtaatgtacaagattacgcagatgcaattgaacgtcgtgctaaggaagccccagctaaagaggatgctactgataagaggccagcttctaaatctaagcgggttaagacaattactaagcgtaagattttagctaaagttataaagaatgataagattgataaatctattcaaaagaaattagaggataagattgcttcaattgtgaagaccaactttattaagccagttaacaagcggggaagtttttcggttgaagatggtgaaaaagttatagctgaacttagtcctttttatcaaaatatcaagattgatcaaaagtatcgcaagaatgctgaaaaagcggctgaaaataaggaaacagaaactaaagaaaagcctgagcaacattctaaggatcagaatgaaagtcgtgaaggtcaatctaaggactttgagcgtaagaataatcagaagaatagcaataatcgaaataataataatcaaacgcaaaatcaacgtaagcgacaaaataagcatccttttgagatcagaagagaaaataataaccgctcacgtaataatcagtctaaccgccgctataataatcgaaataattatgataatcggaataattatgaatttgatgaagctagcggtttgcgtgaacgctacaatacagtaatcagaaattacaatcaactggagcaaagatataatgctttgcaagataaatataatcaggctttagatgataaagctagattgatcgaagaaatgggtaagaagaacgaagacttacgtcgtgtattgatcgacgttttgcgaaaaatgtagtttttggtaaacaaagagactagtagtcaatttgaattgattactagtcttattttatgtttatgaaatatgatttagcttaaaaattaaaaaaatatgtgtaaaaaattatttttgtgtagtaagattaaaggatgataaatatttttattaatgattaatggaggagaagtatgagtttaaaagagctatttaaaagcaatgtgtttcgtaatcgggactttctgtattgaaaaaatgaagagataatttgttattgatctcaatttttaaatcttttttgttaacggtaagcgtataacagtgtcgtttgcagataaaaccatttcttaataaaaaatctacgattggattttcatttgaatcaatcatgacttgcaatgcttggtgctctgcttgaactatttttgaaaatggaatatttacagagtaatcacttagattgaattttagataaatatatttgttatgaaaaagattgtgataagtagaaatagtgcctagatgcttatcgttatcagttactttgtagattttaggagatattttttcaatttttgtagtcattttttatccttttgataattgaaattaatttttgatcggttccgtttttaattatgaagttataaatcggttcataattgagcacagggaaaataagatcaggatcaattttaggtataatgtcaatcattgatttcttactaattacgttgagatttttaacttcttgagcatttcttatctttctttttgcttgtgaaggaggataaccttgtccccaaggctgttcaaaaagattttttatagtctgctcaaaattgatttcaccactccaaccccaattaagtcctagtggaaaggagacaacattgccgttattgatatgaccaaaaagaaaagcatcttgtggagtggggatataaccacattgaatattaggaaaagtatttcatgcaagcatcattccttgtccagaagtacatcctgtcacaatgaagtcagtcgccttgctattaattaataatgcgacagctagggaaacttgcacgtaagatagactagccgaactatcttgataaataccaaaattgaatacttgatcattggatcctacagattctttgatatacttctctaatatgaaatttttacttttttgcgatgtagcttgaataatacctattttcatatttttaacctctatagtttattttttgaaagcgctttataatattatataggaagtaaagtaagaaggtgaacgtgatgaaaaaaattattgttggaactcctgttaaattgagccatgttttaatcggtatgattgtggtagttttactttcactatttttgacaggatttggttatcaagcttggtggctattccttattgtactaattttaggtgtatttgtaactttacctacttgttttaatccgtattggcagattagtagcgaaaatattacaattataaattatgatattaacgatgtgataaaattgatgcaactgctagggttacataaaaagagtaagcaagttattaatttatctgatgtaaagaaagctgccgttgtctatcgtaaaaatgtacgtcttagtcctattgactttaatcctgattatttaaatttgattttggatttaggtaagggaacaaatatgactttgacacttggaaatgtcgactatcagcaactaaattcgattatgggtttgttacaagataagaatattgtagtagatgataaacaaaatattttgcaacttttaagagaaaataaaaacttgtttaaccattttcacaagaaaggctggacatcgctataaatggataaagagcaaataattagaaattattttcgagcatggctaagtcctaatcttgaagtagtccaaaatacatttgacgaaaatgctatttatagtgaatgctatggtccagtttacagaaataaaaaggagataatatcttggtttgaaaattggaataaacaaggaaaagtaattgcttggccaatagaaagactcataattaatggtgatacgagcattgccgaatggcattttaaatgtaattatcaaggaaaaattagtgaattcgatggtgtatcaattatagaatttaatgatcaaaataagataatttctgtaaaagaatatcaatcaaagtccaaacattattatcctatagtaaataagacttttaactgttaagaggttaaaagtcttattttgaatatgaaatcttttataaactaatttctgtggaaaaaattaccaagccagcttcgtttctttttagcctcttcttttcgtcgctgttcacgatcttctaacattgccttagctagcatatcaactgtttgagtcaattgtgcttggttatctctttgttgcttatctctaaatgaactactgttttgatacttattcattaacgtatcatcatcaagccatttatcaaagttttcaacatcaataataaaaccggtgctagtttgttgcgatgcaatgtgatattttctaggcaaatatttaaagtagcgatcaagcatagtagaaccgctgtttttcgccgtttgatcggagattttattgaaaagttctttattgatttgggcttttagccggtcatcttgtttaataaataagatatcgcttccgatttttgcttgattgattaacattccccaatcatttcgaccaacaaatagggagtaatcgtaattttcttcaaaatatttgctgacttggttatacatatcaaatttatcaagtgcagtttttaaaacatgcttgattggatataagaagtctctttcaatcttctgcgcatcttcaacactaacgttagtaaagaattttgctaattcaacttgacaatatttaaaaagatcatcatttgcacgactaaataagctagttaatgcagcattacgttgatcactttcacctgaaaaagtagattcaaagcttaaataccataaacgacgcataatttcaggctttagagaaaattgtgatttaatagagctttcttgtctattcatcgtgaaaatgaatgctggtgagggatgagttaaattacgattgttagtaacttccttgatgaatctttcaaagtaagtacgggttgtaagctcgggactgacatcatcaatcattaatggacttacaggaccatttgtatatacatagtcacttagcgtgttggtaattgtcatattgatattactcttgccaagggcataattctttggatccatcattccactatctaagaaattatgagcaccaattaatttagcggctagtcttttccctagggtggacttaccagttcgaccttgtccgattagtgctgtagcaataggcacgtcttctctagatacattgcttccagataattcatataaattgcggattttccaaagccatggtgattcatatagaaacagcataaagtcacaagcttgccagccttcaccaacttctttgtaagtattatattcatgagtgatatcacagaaaagttgaagcgcattttttaattgcccttcagttaaatcagaagtaataacttcagaagggatgttatcaccaattttagaggcttggaataattgaccattattgtaaaactgaacaggaacagggaagagatcttcttctttttcaatttgtgatgtatctgcttttgcctttttgtcttgacgaataatgtgctgagtcaagctatataaatcttgcccgattgtatctagcttacgtcttttattgccaccttcaccaaataaagtaactgtttgagaagcaacgagtttttcattttcagataatttctttaattcatcatctttgctgtagtggtcgcgatacttttttatctcttcagctgggagaataattatgtctttaccagttgaattaggactgtttttgatttcaagagaagaatcttgcattacatgaatgcgaagatcgtctttatttttgtcttctaaataaccagatagttttttagcattaatataagttgtagcctgattaaggttatcttgaaacatttgttgatagcaattgaataatggatcagaagtattgccgtaatcccaaactaattgttccatatttttattaacagccgtatcggtaagattcattgaacctgaaaaggcagagtacttgctttgattttccattaaataaagcttagtgtgaatcaaattctgtttggtgaaaaaaagctgtaaactaccatctaaaatacgtttagtgaagggactatcttggtgttcgtagctatattcaatcaaatcacgacgtttatttaaaatttggtcaattcttttgccaattgaatttgatccattatcggttagtccaagaattagtgtgatctggtcaaaacgtggtataagattttgctcaataaatttaatattagaaacaaaggaaacgcctttaaactcagagaatttatttgactctctttgaaaatcaactaattgccaaaaatcggcattggaaattagtttttgatcagtatgatttagtatttctaatcccatataaaatcctttcgtgagtatacaaacatttgcttttagtgtatcgtgaaaaattggattagagcaaggaaaagttaatttattattgaatttatgaattagattaagtaaaatctgattcaaataacggaagtaaaaatataataatatgttatcgctttggagaaaattatgacaacagtatattttgtaagacatgctcaacctgatttatcagttcatgatgatttaacacgtcctttgacagaaaaggggttgcaagatagaaaaaaagtaactgattactttagagataaacacatcgaccaagctttttctagtccattcaagcgtgcaattgatacaattcaaccagttatagacgagaagaaactaacattatcatctatttctgactttagagaaagaaaaattggtgatgagtggatttctaattttcatgaatattgtgaaagacagtgggaagattttgattataagctaagaaatggcgagtctttaaaagagacgcagaagagaaatgttgctgctttgaagctagttttgtccaaatatcaagatcaaactatgattattggtggacatggtacagcaattggatcagtaattaattactatgatccaagctttaaatatgaagcctttgctatgatccagccaaagaatccatttattgtgaaaatgaactttgatggagaaaaatatttggagtataaagtagttactttttagtaaaaagataatctcataaagtaaaaatggtaaatcaaggtactaataaccagatttaccatttttttatttgttatattatagcttatgttaaattttatcctgagcaatgaaattatcataaatggttttgataactacttcttcatcttgccgtctggtaccaatcataattgagatttgggatgcaccctggttaatcatttgaatggagatgttctttttaccaagagggtaaagcaagctagcacataaagtcagcttgtccttcatcccttcacctaccaccattgtgattgcataatcatcaatccactgcatttgatcaggatttagactagtttgaatttcattacagataacatcaattaattgatcagttaagacatcttttttgaaaataatggtaatatcatcaattccagatggcatatgttcatatgaaacatgatgtttttgcaaaatttccattaacttcaaggtgaaaccagcacctttatttaacatatattttcttaaataaagggccgcgaagtttttgcctccggcaatacctgtgattgtgtgtttaggtataaagccgtcctctggtacgatcattgtcccaggtttttctggagcattagtatttttaacattgacaggaatttcgccttgaatagcaggaattaaggcttcatcgtgaaagacggaaaatcccgcataagatagttcccgcatttcttgataagtcattcttttaattggcttgggctgatcaacgatatggggattggctgaaaaaatagcatcgacatcggtgaagttttcataaagatcagcgtttaaccccctagctagaatagcaccggtaatgtcagaaccaccgcgagagaaagtagcaatatgtcctgatggtgtaatgccatagaagccaggaaaaatgatcttttcatcttttgcagccttaattctttttaagttcacataagtttcaggattgacttcagcattattagaagtgccagtgacaattaaacctacatcttttggctctaaaaatcgtgctttaattccttgatgatttaaaattttagcaatcaaaattgcattaagacgttctccgtgtgctttaaaggttgccatgcggtagtcattattagggtaacttagcttcggcaatgtaagtagaagctggttaatatcctctaattctgcttcaggcagctcaaaatattgggcaattaattcataacgcttaaaaatacgggtagcgatgtcttgataattattactcctcaagctcatatatgcgtaagtgatcattagatcggttactttaatatcatcctcagttcttttgcccggtgctgagactacaacgacttgtctttcgggatcggcattaataatacttagggccttatctacgctattacctgaggctagggaagaacctccaaatttaacaactttcatatctatttttccttaactattatttcaaatctaaaattgaactgatttctttttccatatcatttggttcaataattttttcggtcttgggttcacgatcaaaaagggcacgcacaccgattgataattgaccgcctaattcatcatgcaattctttaattgcaccgacgccagtttgcatactaggaccaccagtgatggcttcatacaccgtttctgggaacttatatggactggctgttgaaacaatgaccattggggtttgatcgccggtcttcttttgatattgatttgctacaaaagagccaacagcagtatgtggatcaattacatagcggtcataattgtagacccgtttgatttctgatttaacctcttcttctgttgcaaaaccagctgcaaaatttttttgtaatttagtgaaaacttcaccgctaacttgataatgaccgcgttgagtcaattgattcattaaactagcgacttcatagttattttcgccataaaggtcaaataaaagtcgttccaaattgctggaaactaggatatccattgctggtgcattggttaaatggaacttacgtcgcttatcgtagacaccattattaaagaaatcagtcaatacattgttttcattagatgcacaaatcaactttttaataggcaaacctaatttcttagcataatatccagctaggatgtcaccaaagttacctgttggcacagcaaagttaacttcgtctcctagtttaatttcttgtctgcgtactaattgtccataggtgtagaggtagtaagaaatttgcggaaccagacgaccaatattcatcgaattagctgaagaaaattgatagccattagcattaagtcggtttttgaaagaatcattgttgaagatttttttaacttcagtttgagcatcgtcaaagttacctttgattgcaattgcacgcaaattgttgccgcgttggctgagcatttgcttaagttgaacaggactaacgccaccttcaggataaaagactatgacatcggtacccttttgattagcaaagccacgcattgatgccgtaccagtatcgccagaagtagcggttaaaataataatatctttatcaatcttttcaatttgaacagctctggtcattaattgtggcaacatttgcaaagctatatctttgaaggcaagggtaggaccgtgaaaaagctccatgtaaaaatggttatcgtgcttttcgattggaacaatgctgcgatcatcccattgttcactataagcgctttgaactgcagtggtgatttgctccttagtaaagtcatcaaagaataagctaataaccatggcagcgatttgcttgtaggaaagtttggataaatcttctaacttaaaattagcttgaggaaaggcaacaggcacgtaaagcccaccgtcttgagccaagccttgaataattgcttgaggtgcagttaaagtgttttcttttgaacctctagtactacgatattgcataaacaatcttcctatcttatgaaatattaatattataactattgtaccttgattagcacctatgatacaatcgtaaaaataagaaaatcattaaaaagaggataagatcaaatggccatcaaaattgcattgcttggattaggaacagttggttcgggtgttttaaaaataattaaaaataataaaaagaagattagacaaacaagtggtgaagaaatcatcattgaaaaagctctagtacgtaatccagaaaaacatcgtaatttagctaacgaagtgatgctaactacagatttcgattcgattttgcaagatcccgaaattaaaattatagttgaattaataggtgggcttcatcctgctaaggaatatattactgcagcaatcaatgctggaaaaaatgtagttacggccaataaagacttaatggcaacttttggttcagaattgattaatttagctgcaagtaaaaagtgtgatttaatgtatgatgctagcgttgcaggtgggatccctattttgcggaccttggctacctcttattccagtgacattatttccgaaattcaaggaattattaatggtacgacgaattatattttgtcacaaatgggggaaaagggactaagctacgaggaagcgctgaaaaatgctcaagagctgggctttgcggaggctgatcccactaacgatgttacaggtaaggatgcagcatacaagattgtaattttaagcaagtttgcttttggtactaagattagtattgatgattttactattcaagggattaataatctaaaggattttgacattaaacaggctcagaagttaggctatgtcattaagctgattgggattgccaaaaatattaatggtaaattatttgtagaagttgctccatgtttgttgccagaaaatgcgattatggcgcatattaaaaatgaactaaatgctttacaaattaagagccaaagcctaggaacagcagtattcacaggcccaggtgcgggtagctctgcaacggctaattcagtcatgagtgatgtgattactgaaataaaaaacgtagtgaaaaagaccaccggtcagccatttagtaatttctcccatgttatgcaattaacaagttcggaggatgtgaagtattcctattatttatctttcgaagcagaagagaccttgtttgatttgagtaaattactctctgatttggaaattccggttcgtgagattaaacaagtacaatcaagaattgtagttgtaaccgaaaatattagtcgacagcagctacaagatttagcgattcaagatcaatatttaaaagctagctataagattttgcagtaaaggaagggaaaaaatgattattaaagcaccagcttcaacggcaaacttgggtcctggctttgattcacttggcatggctgtttcactttatttggaagtagaagttttaagcttagccgatcgctttcaggtggatcatgtgatgaaaggaattccacatgatgaaaaaaatttaattgttaagactgcactaacagtttatccagggttaccaccgcttcatttacgcgttaaaagcaatatcccattggctcatggtttaggtagcagttcaagtgctatcgcagccggaattgaattggctaatcaaattggtaagctgggactatcagatgaagaaaaggttcaattaggagctaaaatcgagggacatcctgataatattgcaccgactattttgggcggcttggttgttggtgctgaagttaaccatcattttgatgcagttgaagcaccacttcctccatatgcgttggtggcttatgtacccgattataatttggaaactaagacagctagagcagttttgcctaaagaattagcttttggcgtagctacgcatggctcagcagttgctaatactttaattgctagtttgtttgctcaagactaccctaaagcaggagaattaatggaacaagatgtattccatgaagtttaccgagaaaaactagtgccagaacttgtaaaagtgcgggaggtagctcattcaaaacatgccttggcaacttatttgagcggcgcaggttcaacgattatgacgtggattgaagataaacatgtagctggatttttgtcgggcttacgtaaacatgatttaaaagatgagacattaatcttacatcctgatgaacacggtgttcaaattatccaataaaaagactgaccaagcggtcagttttttagtcgtcaaaggttgcagcaaaactatcaccatcgattagcattcttttagcattgacagcataccaataaggaataacttcagtgccattttcttgctctaattcacagtcggccatttttaaaatttggtctaaatttttagcactgatgttagggtagagcttcagtaaagcttcttgagtaatgccactttgtttaaagccactagtgggataattggcagaaaaaatatcagaaaaatcatctaagtcatatctaggcttaaattctccatcaaagtatttgatttcgatgttttcaatttccataaaggcaccaagttgttttgccatgtaagggaacttattagctagttgttcaacagtaaaaccattgtttgctttagttcgtgcattgggatgcagtttaagccaagcttcacgtatattatgactatcttttctttcaataagaaggtctttgactttttgaatagctgcattgtgtctgtttacggctttttgccagtctaatcgattaggatataactgtctatagcggacagacaagggatgatcgattgcgttgtagataaaattcagcttgtcagtggtataagaagttagttcatcgtcacgccacattaattcatagtaagaactcatgaaagacacctttctatttggatagactaattaatattaactgaatagtatcattttttgctccgattaacaaaagtgataaaaatgtctatttagattggtcagaagcaaaacttttgttaaaattaatgtgtttactattagtatttgctcaaaggatttgacaaactatggatcaacttgataagttcaaccgacgctacaattttctttcaaaattgtcagctgccttcttttattcaattgcggttgcagttgccttgaactttttttggacgccggggcatatgtactcgtcaggaatcacgggttttgcgcaattaattaatactgtaagtgaaagatatctaccgtttacattatcaacatcaatgatgtactttcttttgaactttcctttatttatattggcttggttcaagataggacataaatttactttcttcaccatcgttgctgttgttctaggttctatcatgatgcacgctattcaaccttggcagatgcacctggacccactggtttgtgcgatttttggtgcttcgatcaacggtattggaactgggatggcattaaagaacggtatttcaactggtggactcgacattattggtattgtaattaggcaaaaaacgggcattagttacggaaaatttaatatttttattaatttgattattatcgctgctgcgggatacatgtttggttggccacgtgctctttattccgccttgactatttttattaatgggcgagtaattgatgcggtttatacccaacaccagaagatgcaagtaatgattgttactcagcacccacagcatattatcgatggtattcaaaaccggatgcatagaggaattaccattttgcatgatgctgaaggtgcatacagtcatattgaaaagacagttttgattaccattattgatcgatatgatatgtatgatattcgccaaatcgtgcaaggagcagatccgtatgctttcatgagtgttagtgaagttgaaaaagtatatggtcgcttcaaggagcaagaaatcgtttaatggatagcccttaaaccttgatatataaggatttataaatgaaatttgaatcctaggggcacttggggagcaaaactattcaaaaagaagcagaaatgcttcttttttatttggagtggctttttgtaattatggctttattattggtctttgttaaaagtgattaaaaatgatattatttcgattgagggatgttgatatatcgtggatcatttagtgtattctccacgagtgtggaggtgatcctatcatcttgaagggcacgggagacaaggcagagtattctccacgtatgtggaggtgatccaagtcgttacatcagccaaaagatgaggcttaagtattctccacacatgtggaggctaaatagctgctctgaaaaatatgttctatagagtgactgtttttgtatattatttaaaaatattgttgatggtgcacggagattgcgttcacttatatagtgaaaagatgctaagaaatctaaaatagaatcgagatgaattggtaatctggtaatcgtaagaaggacttagctactaatcgttgtattcaattttgataacaaattaattaaagagcaaaaaatatgaagaattataaatttaataagtttatgtaaaaacagtgtcattaagttaggctattgattttggtgaaaaaacaattaaagcatcatttggctttagacggccagattgatgccctttttggcatatttttctaaatatcattcgcgttacacgtaaaagcgtgtgttgtatatagtgaaaggaggctaagagaatcggagctaagaggtgacaaatatgccgaaagcctataaaattaactcatactggcaaaaatactaaatggtcattaaagttctatcctaaaagagctttgttaactggtgttttgattgtgattgctatagcattatggaaagtgatttttaatggctaaatatacagaagtaaataaaaagtggaatgataaaaatgaggcccgtaagctttacattaataagaggtcaacgacgaaaaactttattttaaatcttgctatcgaagatgatttagaacagattgaaaaggatattgaagaaagacgcaataatttgtaaagaaataaaatgggatacatcaggtaataaaaagtgcatctcatttttatttgtatataatactagttaacttaaaaaagcaataaaattcaaataaaatggaggtatttcaaagaatgacagagaataataaacaagccaaaaccactgataccaaggcaaaacccaacaacgacacagcaatcttcgctggcggttgtttttggtgcatgaatccagcactttagcatctcctccttacgggtacatggctttgagcatatttaactaatacgcagaaatttgaaaaccgaaaaaaaccgaaaactgtttactatacagattaaaaatttaatgactaatttttttatattgatttatattagttacattagaattgttgatattattttcaatagaaaaattctgtagcttattagctaaatcctttttcacttttttagtaatatgcaggtaaattcttctggtaattctggaatcaccatgaccaacacgttgctggattacgtagagaggaacgcccatttcagctaatttagaaacgtgagtgtgtctaaatatgtgagtgacgagtttcttttttattttctgtcttttcatgatacttttaagtactttatttaacttagaattattaaaatagccctcactggttttccagttgtttgtaaaaataaaatcatttgcctttttgtcttcacagtgattttttgcaatagtaatggcttcaggaggtaaggtgacatctctatcaccagcataggttttagcgtttttggtttttatatgacgcttagatggatcaggttcatttctaatagtaattaaagatcctcttacgcgtgcaaaccaagtgccgtctttatcttgtaagatgttctttttttgaattgcggcagcttcaccacatctcataccagtaagatacatccattcaaagaactcttttaaatcaggtcgctttcgctcgtcacaatctttaagtatcctttctaattcattatcgtctaaatatttattttcaatttcttctcgtttttttaatgattcacttttccaactgattttaactttatcaattggattattagaaatataaccgtatttaatgcccatttcataaactacaccgatacatgatttataagagttgacagttgcatttgcatagggatgctcaccatatagcatattgtccaagtacttattgatgaattgtggggtaacattttttgcaattgtatctttaccccattcagaagatattttatttagagtggtttttttacgatagtaggtattgtaagctagctgtttttgagctatttccagatatttatcttttaattctgcaaaagtaatatcagtttctccactttcaagttcaattaacttagtacgaattcttttatcaagaataatttgagcctgttttcgggtttcacgattatttttgccgaatgtgcaactagtttcatgccatttattagttataggatttttatatgattctctgaaaacgtaatttccattcttcaattttctaataaacatgtttttgacctctatttctgctaaaatagagtacgtaaaaggcagtatgtcttttacatacttaatacttatttactgttcaatttttgttcagttcagtttaatgcatctagtatgattgccagatcaaagctaggtgctttccctcacttgttgccagacgggtgagggatttttttgtttcaggtttaacgtcactgtggacgattatctttgttctttccaaaaatctttgtttaaatactctgcacttaattccatttgatcacaaagataatttttttcatcaggatatagctctaagtattgattgatataaatgcctaatcctattctcaattcattgtaggctgttttatcatctgcaatatttaaagcttttgctaaagtgcctaatcgactttttcctttattatttctataatcagccggtgaaatttccattaatgtatgtataactttgttatatggtaactcgtgaattttggaaaaatgattataaatcctgccaccatgtgcagctgtatttctataatcgagatataaagacaacaatgatgtataacccttttcaaaatcaggtaattgttcaattaaagtgggctctaagcctgtcattattgaaattacatttcttttttgatcacctttgagtagctgataccaccaaatcaaattaccaaaatttaatttcttaacaataatccatgggggaatatttccatgtttatctctgtagtgtttaaatggttcagcatttgaatgagtaatacgtttaagaacatctagtaatacatcaataggataagcttcacgacctaatgagcgataatattgtttttttccagttcgataattcgaccgttttagatagctatcttgcaactcagtatatttttcagatattgtgtatgcaactgcttgtcttaaattagattcaaatatttcaagagcagacattacctgagttcttaaatttctatctaaagtaaataacgcaaatatatgctcaaatgtaacattaggcttgaagacatcagcttcgttgtcttcagaaccaactaaaaaataatctttataaccattaataatttcataataaccatatctacgaagattatttttagcggcttcttcattttgaattagtaatccacgactttttaatatacttatttgttgatcaatagttttaaaaggctttgggttcataaaaacacctcaaacacaaaagggacatgtaacaatacatgtcccttttggtctgatcgcatagcgatcacttaacttgattaactttatgttaacctatgtgacttgttgtgtcaagagacattactttgtatcatttagtatcagatagtgtcatttggtaatatttcgtttaataaggagtgccactttctgcttggtgtaattgatccattgcatatttataagcttcatcgcgtaatgcgccagagtaggtattagccttactcaacttatcactgattgaaatattaggattattaaagtaagctacctctgttgctgataaagttcttttatcatatttttcaggagtagtagcaatctttaattttgaatgatgcttagctgcagtctttgcctttttaattgccttgcggtatttcttagcattgcgtttgttatacattacaaaccacttggtgttgttgggactaactttactcaaccattcatgccaatgatattgtttagttacattttcaggaatagcaaaatctttaggaatagggttaaatgtccatttttgatgcccatttactccatgatagatttttacaactctacctttttttaaggtttttgtagttaaaattactccattgtctgataagctatcgttgtttgcaattagattgaatttagtattcttagttacaattacttttttaggtgagagccaatatacaaagtgcttgggaagttttgcagcttctgcagtttgaggtgtaattggacttgtagactgttttgtatttgaacatattccaattgcacccataagagcaactgatgcaagaccagcgataatagattttttcaatttcttaacctccaaaagtcaggcttaacgtcactgtggacgataatgtataatattgctaggtgattaaaatgttaaaagatattatttatttcacaaaagaagacggtcaaaacaagctactaatggtatcatccattactgaaggagatgctatggcattagaacattttgacaaagctgattatgaggcttgtactaaaatattaggacataaaccccataatatttataaatttattgatggtatagagtttaaagtcctaagatcttggataaagccttagttgctatactggataatattgtcattgatacactacttaacttcgaagcagcaatttttgtttgatgccaaaccttattatctcgaattgtgtctataaactggcaaccgttccaagttaatccgccacatgaaaacatagcaagtgaattgtaagtgtaagtaggtttaccttggataaagccagcatctagtaattgaagcagggtatatttaatatcatccgcactgtaatgatctgacagtacatcagcagataaaaattgctgaagagagataaacctaccaggtctatgttcttgttcaataaataaaagaacatctcttacacaatcatgatttaaccgcacaattaaaactccttacaaatcataactaactttaataactttgcctaagatacgaccaggattttcttcgttaagaagaataggatcgtattttttattttctggcatcagcattacttgtttaccaacgtgtttaatacgctttaaagtggcttctgtgttgtcgtcaactaagactgcagctatctcatcatcttcgacagtaggttgttcacgtactataactgtagctccatcgggaattttgggctccatggaatcaccttgacatcttaaaacaaaaagtgtgccatcaggtttttcattaaataattcagttgtataaccctcaatgttttgttcagctaagataggtgtgccacaggcaattgtaccaatgatagggatgcgaacggcgtgcatccctgattgagagagtggcttcatgtttgtaggttgtttattaactttaagaatatcaggtgattcaatattgaataatttagccattttctcaatatagcccattctaggtattcttgtaccacgttcccaattataaactgcctgttcagatacatttaatttatctgctaattgagcttgggttaaagaatttttagatctataaaattttatattttcagatatagcactcattttctcacctctttgttattagtataacagttttgttagagaaaataacataaagttaggaaaaagttaggtttttattgaccataacaaaatgttagggtaatatataagacgtaaggaggtggtaaataaatgagtagcaatacaaaaatcactttaaaagctgctagagttaatgcaggattaagtcaaaatgaagctgctaaaagcttgagctcatacttcagtatgcccatttctaggcaaagagtggcttcttttgaaagcaatcctgataaagtgccgcctgcttgggcagaaggattctcaaagatttataacatttctttaggtgatatttcttttacccatagttaaacgttatgttagatttagtaagggggcgatgatatgaaactcacgcttgaaggctcaccaaaggagctgaaggaatttcttagcccgaatgtggatgcgagaaagttgtggaaacaaataaagacatcagcattacagccgatgtctgaaaaacaatattcaaaatggattaaaagttttgctttttcgtccacttcaaaatctcgggataaagagatgcataagcatctaaaacatgaggcttagcatgaattttgacaccataagcttctaaatcatcccagtgattttgaaggattaagagtgtcaaatcatgtgctctttgttcattatcaatcataaaattcaccttcttattcgagtatgaattcattatatgacaaagaaggtgatgaaataaaaatgtggaacgtagtagaaaagatcttaaaagaaagatcacttaccatttatcgtttatcgaaaatgacaggtatttcagataacacacttagaaattatcgaactaagtagtctgatcctagttttactaatgcttgcaagattgctgatgcattaaaggtaagtctagatgatttaagagagaagtaaggaggcgacaaaatgaatattagagaggcttgtttaatggcaaaaaaagaaggtcgtggcataactcgtaaaagttatggcccagaccatcaatatatttgccaaccaatacaacagcttgcgttttaattattccttttgcagaaggacattttaaaaccaaacgctggaatccaaacttggatgatttggttgcaactgattggtatgtatatggctaaaaaagattagttatacagtctgttttctaaagcaaaattgatttgttcagaatctaaaacaactttgggatgaaattccataatgttttgagcgttatcaatcttaaacttaaatctcattttgtcagaaattatgtttgtagatctgagattctgaaagcttattacaaaggttttagacgatctaggtggaatatttaatggagtacagtcactaaagacaaatactttatcattattaaatctagtctgtgatattagttttactggaaaccaagatgattcaacagtttcatcttcatttgtgaaataaatattagtaatcgtcgatggtctagaagacatatttgaaactaacaagcagatatttaattgctgacctagctcataggtccaacgtaaatatacacgtgtctttatatgtttctcgtaataagtattaattgctgaataaagtgagagtgcaaaagctaaagtagctattgcaattgaaacaatttcgtaaggagtcattgagatacctcatggataaaaattacataattgcgattattggagcggtattagccattatagcaataattttagccttaatttagtcattattaaagtcctgaaaggaggtgaaaaatatgtccgataaagagttattagaaaagatgaaaaaatatatcggccgcaagttggatcaggacagtgatcctaacgccatgaaagctatcatttctgaatacatgcacctgaaaggagatgattatagatgatggccaatggctggaaaacaccaaaacaaatccaagaagactacaatctggcagataaaacgtgggcaacttggagaaaacagtgtgaagcatcaccttatgcggatgcaatcgtgagagtgtcgacaagatcgacatttatcattgaaccgttgtggcaaaagtttttgatctggcagtcaaaaaactttgaagaaaaacatttagatccgcacttgcgcgatctgaaagtattaaaggagaactgaactatgacaaaaatgaaaacggtaattgaagtaggtattgtaattggctatgccgctttattcgctttagcgatcattggtttgtactgcaaccctgacgttttatcagttggaatgtaggaggctgcagcatgtcaaacgaaacatttaataatctgttgaagaacagcaatgctttatttgatcgtgataataaaatttggtcaaaagaatcacttttgaccaaaatacaaaaaagcgtgttgcctgaaatcaggtaacacgcacaccaaaaagaatctacaaagattatatcacaaaaggaatcttatttaagaggtaacaccatgccaaaattaaaaagagtatatgacaagagttacatggttattagcaatcatgtttttgaagatcccaatttaacactaaaagcgaaagggttattcggctacttatggtcgagacctgatgactggaacttctttatcaccgaattggttagacactttaagggtggtagagatcaggctatgagcgctttagatgagcttgaaaaagcaggctacttgcttagaagtcgtgttcgaaatgaacttggccaacttactaataaaagtacctggttgctatctgacacacctaaaaagacttggatcgagcaaaagagaaaatctgcagctaagaaaaagatagtcgttaaaaagcaggttcaaaaatctgcttctaagaaacctgtggataagtctactaagcctaagtcggattttcctacacaggcttttcctacgttggataatccgacactactaaatactgacttaactaaatactcatataacaaaatacttaataattttatttatacttcttcttcttcctcctctactacacaaaaccaagtaaatcatgaagatgaagaagaaaagataactcaaacaatgtctaaattatttgaatcaataagattctatgacaaattttacggcacacataatcgaccaaatcttagacaattaagacaaattaggacaagagttgctcagcttcaagaatcaaatagagatgaactatgcaaggcatacgatgaacgaatccgaaatctgtatgttaatagtccaattggctatttgattactatgcttaatcaagaactaaaagatcaagaaatatggaataaggaggcagctaccgatgcagaaaattaatcacgaagacgaaaaaattagtttagctagaaaaaagattttagttttcttacctgctggaattacaactacaccagcttggctgtttgctaaatttacaacatcatccttagctagacgtggaatcagaagagttagtcctgggcttagaacctttaatccagatgaccaagaaaaacgtggccaagttgaatatgtcattcagcaaaataagagtgacagcgttaaaagagttaatgctgatacgccaattagttatcaaggatggggcagatggtcataaatgggcaagaaagaaaaagcaacaattaagaaaatattggactcattacagcaagcagatgatatgacaatggctttagattttattagatctgcaatattacttgtttgtactgaaagtgcaactgcaaatgatggtcatgttgtgactgataaagaaaagaagatagtcataggccgaatgcttatgaaagctttagctctttttaatgatcatgaaatgcctgaattacttcaatcttttaatgctgatgaagaagactttagtcatgatacacacggtaaattacttttaaaaataattgatgctgaattggatcaaatgtgaaaggtagcataaaaatggcaagtaatcgacttgaagatttaaataatatgctttttaaccaactagttaggttagacaaagatgatattagtgatgaagaaatgaacaaggaaattaatcgtagtaaagctatgaatggaatagcccatacgattgtagataatgcacgcgttgtattagatgcagctaaattcatggataaccgtgaagatgctaattctaaattacctcatatgattggagttgatgcacctgatgacaataagaaggtctgatggcacctttgttaaaggtagcatcccttggaataaggggttacatattgatttaagtaatggcaaaggtcagtttaaaaaaggaactattccacctcagcatcatgaagttggctatattgcacatcataaagatggctattcctttatcaaagtagccgaacccaaaaaatggcaattatatcaaaggtatgtatgggaaaaagctcatcgtaccaagttatctaaagatcaaattgttattttcttagatggcaataaagaaaattttgacccagataatttagcagtggttactcgaaaagaattaatgatattaaatcatgaaaaaatgctgactgcagataaagatttatctaaaacgggagttttagtagcaaagctaaagatgaaaattaaggagaaagaaaatggctaaaaagattgtatggcatggaacatttaagaattttaaagcagatgctaagggtaatgtgactcttgctttttcaggaacaggtaacaatatcaattggcaatggctgaatgagtttcgtcaaaatggttctgttcaattagttattactagtgatcaaacagaactagatttagatgataattctgatgattcaaagcaagtggaattatttgatgaaaaaggggagcctaagaatgaatcaaagtgatttcgttagattaatcagtctctacagggatgcccatgttagcttttcttatgatcgtgtaaaaaacactttgcagttgattactatcagttttgaagatgagtgtgatgaaaattactgtgaaatcatagcagactggcacactcggagcacaacaattttgcgttcttcagcattagagcctgatgagttgctgcaggtttcttacgttatgaaattgctcgttgactttttatataaaggagtagttgatgatggatcaaaagaaatggaataatcgaactccttttataccaggtaaatcttatatacctgcaaagttgtttgcaaagtattctgcagcagatttattaaagtatggtttacgcaaatggcctgatggaactgcagttgaaattaatgctggaatttttagccatgcaagattgctagtcccaatgaagcagaaaataacttttcaaggtccaaattggtatatagatgtagaagggtatacccatgaagattaaaagtatcaaaattaatttaaataaagagcgactagacacagttatgaaagctatgcgtgcgatcgaacatgaaaataaagccgaattctataaagcttgcgatcaaattgtagcagatacaggaactagtaaagacgacgttgtttttcatattttatgttctacgtataaaaatgcaatttcaatgttaatggcaaaaggttaggtgagttaagtgactgaagaattactaaaaattcaagttaagaatgatcagcaattggtatccgcgcgtgatttacatcgtggacttggattaacaactagatttagtaaatgggttgagcaaaattttaaagattttgaactaggtgaagattatacaagcgtaactgcagttacggtagttggaaatggtggtcacaagccgatccaagattatgccttaacaatcgatatggccaaacaactatgcttaatgagtcataccgataaaggaagagaatatcgtaaatatctaattgaaattgaaagaaagtggaatgatccacaagaaattgttagacgtggttatgcaattcttcagaatgagaatactcaattaaagattgagaatcatcaaatgaagcctaaagcattatttgcagatgccgtaacagcttctaatcgaaccattctaatcaatgatcttgctaaaatcttaaagcaaaatggtgtgcagattggtggtgttcgtttatatcgctggctaagagagcacggttacttaattaagagacgcggatcagattataactctccaacgcaaaaatccatggaacgaggtctctttcgtgttaaagagtctgtaattactcattcagatggtcatacgactattagcaagacttctaaggtaactggcaaaggtcaaatctatttcgttaataagtttttgaatagtgataatcctgatacggcacaatttagggaggaaaaataatgaaaccttgtgatttttgtaatttcaaaaatagagatcgtcaaacatacgtaatttactatcgaaagaaaaatgatcctacacatcagagaaattttttgttttgctatcttaacaataaaggtgaactagaaattgacggtaaagatattgaaggacatactgatgaaccagttaatttttgccctaattgcaggagagatttaaatgatgaagattaagtattacttcgaatcagcatggcactggtggtggtctatttggaaatgatgctttggatagttaatcacttaaatgacattatctttgtcgtgtggaccgtgttgctggctatgaacatgtattctaatcataagaatgaaaagtccaaccaggagcttttagatgagattcataatagcaatgatttaaacgacaaattgctgaacacggttaaggaatacatgcaaacaacagataaaaaagcaacaactcaagacaacattttgtgggacagtatcattattttggctaaaagaattcatgatttggaggataactactttgttaaataagaaaaaatggatttcatttgataaaaatggcaaaagcatttatgctgattcaattgttcatgatgaagaagcagatgaatatttcatccctactgaaaagaatggtctttatggggatgaattccttggggatttttatttattagagcctaagaaacttacagtaattagttcccatacttcaatggatgatctaaaaaggatgatgaaaaaagataaaacctcaggtgcagtttacaatgttggaggtaactttaatgtctaatccagtggccgatggctggaaaaattatttgcactattttgcaaaactaggtagggaagttgatcaaatgaaagaaaatattgatattcaagttggaaccaaaaaatcaaaagagacatggaataaaacatataaatcagttttcttagcaaacaatggctggaaattttatgaactttcaggaattagattttgccagtatcttgctacagttcaaactaaacatggtgaattggttgttcatgatggtgattcaattacatatctaggccataacttgtgggatgtacgtaaaggataataatcatgaagattaatattgatgatttagatatttatcaaaagacctggaactacgggatgcagaagattgctgcaagtattattgctgcagcatataacttgaattctggcgatgttccaattacaaaaacggattatcatcatcttgtatttaaaggatttaatccaatggatatgaatgagagttttgaaattcagttgaagatagttcctaaaataagctttaagcatagtagtcatgaatagctaatcacaaacagttttagggatgcatgaattaatgaggtaggttaagcaaaatgtattatttaaaagaatttgagcattgggatcgtaaaaagactgcagctaatgttcaacagtttcttactaatgattttcctataattatgagtagagctgataaacagattacagatattactagcccacaattaaatagcatccctagtcacactaatggtaattcacaagagaaaaaggttttagatcatattaactatgttgctgtgtttttatgtgttgctgatacatatgctcatatgtctaatgatggtaggaagtatagagagatcattaaattattatgtctttacaagttagatagaaatactgtttctaacagattgggaatagatacttcaactttggataaaagaaaagttggtgctctgtgtgaatttgctaatcgatttgaagttcagaaaaagaggcatgaacaccaagtagattggattcctaattttagagttccaaaataaatacaaatctgatacaagattcatacaactttcgtacaacatttatccaactttgatacaagatttatacaacattcatctaacatttatccgaacataatgagttattatgatattgtgaattaattgagagaaattgattcgcactcttgatacggtaagtcatgtacttaacctccttttgtgattttaaatagcaggcttagtaaattactattggctgctattattatgagagtttagtctaataggtaagacgtcaaacattgcctgaagatgcaggttcaaatcctgtaactcccttttgaatatttattgtagtaatgaattttaatttataagtttgttttatgattgacatcatggtaaggtatatcgattaataaatattcagtacatatttatgtaacggaagcatcttagtaatactgagtgtgtaggttcaattcctacaatatgtatagatggctttaagtcatcaggatcgaacgtgtcaaacggtcaatgaagaagcaattgaggtttcagttgcttctttttattttcacaataaggagtatgtaaaatgccacgagtaaggcgatgcaagtatctaggctgtcatgcatttgctgttatgcctaatcactattgtcaaacacatattagtcatgaacaggaatatcttgacagaagaaataaatatcatgaatctaaacaaacacgttggaaatataatcatgtaacacgttatcgtaattcaactaaggcaaagcaaaataagttttatcatacccgtgtttggaagaacctcagaaaggtagttctccaaagagattaccacctctgtagatattgccttaagggaactggaactatagtagatcacattgttccagttgaatttgatattaatcaaattgataacgttaataatttagttacatgctgtcgtgactgtcacgcgaagaagacacggtgggaacaaaaatattatgggactggtttgcataatcaaattaaacccgttcctgagattacggacattaaaacaatttctaaattaatgaatgttccagacgggtatgagaagcccttagagcaatttaatttttgaagtccatagtttatcaaaacataattttttaatgccccgccccatgttttgcttcttagggagccgcaacagtgtcgttttcttgtgatgcgcaaacatttttgaaactttttgataggggggtcaaatttggcgaaagttgatttatcaaggccgaaagtgcctacacaagctccaaaatggcttgataagtacggaaaacttttatggccaaagatggccaactatcttaataaaaatcctaaagtcctgcgtgcagatgaatatttattgcagcagtattgttcagcatatgatgtctatcgtagagctcaacaatctcttaaagatgatggactgcagcagaaaatgtttaagacggtagttaaccctgtgactggtgaggtaattaatcgagattttgccggctatagaaaaaatccggcttatcagatgatgtctgactcattatcaaagttaaattcaattggtcgtgagcttggattgagtcctaaagcacgatcagaaatgatagagtacaaggcaccagatgagaagaaacaatcaattacagattcaatgaaggagttctttaaaaaatgaattggattaataattatgcacaattgaaatattttgaggagatacttggtttaataattggtggaattgtatttatagtgattttcattctatggctggttatgtggtttaaggattatagaaaatggaaaagataataggaataatttttatcataattgctttatttgcactaattcaagaaggaaaagattgatgctttatttcaaatttaaagatgacaaatggtttgaagctaaatcaagaagctttgcttatatggcttataatttaagctatgttagttctcggctactacttatgagttttactaaagatgaaactcaagcaatgatacaaatattttctaaaaataactagcaaaacattagcttattaatatggaggtggtaaatgtaatgaaaattgatttaacacaaacgcatgatgtacaaggtgcctttgaagcagttaattggacggacattgccaccaaatataccgatcgtggtactaaatactgtttcgctgttttacatggaccagtaatggcaccatataaaattaaattagcttgttttcggcatttaagagatttgcaacgtcaggatcaacgtgattttccttatcattatgacattgcggagctggatcgctttttgaagtttgctgctatcgttcctgaagctaaatcaaataaacctgtagccttaaccgactcacaggtttttattttttctcaattagttgcgtggaaagataaaaacaatcaaaaacgatatactaggggaattttgtcaatggctcggcacaatggaaaatcatttcttatgggtgtctatatggcttatacatttttgattgcatctattggattaaagaatcaagattacctaatttcatcaatcaattttaagcaaacatctaaattaatgggttatgttaagaccacactgagtcacattatccaaattgagccatttaagtcttatgccaaagaatgtggtattgatccaaagagtttaagttcacaagcatctcaagtcagaatgagaaattctaataatacaattcatgctattacttataattctggaagttatgatggcttccacttcactttggccataggagatgaatttggtaaagttgctgacacccaaggagtatcagatattacgactggtcaaaatggccaagacaatcatcaatttattcaaatttcaacagcgtatcctgatcctagtgttccttttcatagggatgaagttaaggctgttgaagcaatggaaagagattgggatcgaacaagtggtgataactatctttgcttagtgtgggagcaagatagtaaagaagaattattcgaacctgataaatgggttaaatcgaatccgctcatttactgtaaaccgcaaatgaaaaaagatttgatcactgatcgtggaaatgctttgttaactgattcagttgataaatttcaaaataaatctctaaacatttggcttgagcaatctagggatagttttcttaaattagatgatgttgagagcgcaattctagaggactttacaatagataatcgtgaggtattcatcggatttgactactcaatgttctctgataacactgcaattagttttgcatttccatatggtgatggaaaatttcattttatgcagcattcatttattccatttcaaaaagcaggttcgattgaagtaaaagaaaatcaggatggactaccatatcgtgagttggccaaaaaaggatattgtgatattacagaacatccagatggcattatcaatcctgaacaagtttataaatggctgcttcaattcgtagaagaacatcatctacaagtggttttctttggctatgatcgctggggatcattccaggttaaacaaatagtggagtcattaaacgtaaatactaattggaatattatggatattcagcaaactacactgcagttggccaacccaacaaaatttttagaagagcaatttattactcataaagctacgataaatgatgatcctatcatgaaaaaggcattgctgaatgctgtagttaaagaagataaagttggtattcaaatagataagatgaaagcaactctaaaaattgatgtggtcgatgctttaattgatgccttatttcaagggatgtattattacgatgaaaatgctgatattaattctaaggaaacggaagtagatagaatgactgaacaacaggttcttgactggtttaaaaatccaaattcgggactaggagatgattaaactgacaaaaaaagttttaaaaaaattatggttatacagtgatatcattgcttggattttggcaatgattttcttttgtattgcattttttactatcaataatacatttggacttttttcaataggaattagtttggttgttttaggctatgtttttgaattcattggcagaagtaaggggaatagcagtaaaggaggtgaataaaaatgccaatttttaatcaagctcctaccaataaatctgctatttctctgaacgatgatcctggtatttggtctgcattaaataagactgaagatgagtatgtatctgcagataatgctctggaatactctgatatttattccttgttgtcacagttatctggagacttagtattagtaaaatataaggctgataaatctagagcacagtcattaattgataatccaactggtacaaccaatggagccgcattttggcaatcaatgtttatgcagttgcttttagtcatgtggtaataagtcaatgtaaaagttaaattttatttttaattagtttgttttaaaaccaaaatttgcgtgcatgaaactaagccctatttcaagggattttttaacaactattatttactcctccaaaaatgttttagaccaattaatcacctcggtgtttgatagatttgaccatttttgagcagagtgaaaatggtcctggttaattttcttgcacaaagaacgcaagcgcgtttatgcggagaatagaaagcttcatcgtatttcttttgatagtacttccgaaaaacgggatctctttgtctaatcaggttggcagcttcaaccaaataatatcttagataatgatttccgtttttagtcatcggtttgtgttcgctatcaaaattactagattgcttttgacgccaagctagaccagcgtatttagctagctgtgcttcagtgtcaaagcgatcaatactgccgatttcagcgataataccagcggaataaactgacccaattcctggaatagattgtagtattctctcttcaggaagcgtttggacgatatctgtaattgctttatctaagttcttaatcaatttctgattagttttaatttcggcatagtaaacagataatacggcatcaatcgagtctttcatgactttacctaagcgatatgatcctctaacggcttttctgatcgctttagctaaagtctctggatcagagaagcggccacgtcctttggtttgaaggtagtcaattagatcctcgattggcatttcagcgatttcatcgatggttttactatcagtaacaattgacagcatcgttgcgccaaagatagaagttttaatattgtctttgtcaacggtaactagtttgtttacacgataataaagagtttcaatgaagtgctgcttagctctagtgagcgaagatgtgatttcatatctagctctagttaaacgctgtaaagctaagtattcctcttgccgagcaatagtgacatggtatttaccaaagcgtaagtattcagcgatgtaataggcatcagtaggatcattcttattttcttcgtaaacgtcatgaaatcgtttagtgtttttaggattaatgacatcagtttcaagattaattttttgtaaatcttcgtcattggcaaagaaataagcagggtgaaagctatagattgaagtggcttccatgccgataattactttgtcatagctgttctgtttagcaagttgaagaattatctttttgacctcattagcaccaatcaggtcattagaaaaagattggttaagtaaaggtttttgataattttctgagtcagtaatagcgacttgaagatcttttgaactaacgtcaattccgataaaaagtttcattgagaatggcctcctttctagcaaatatttggtcatagatcgatcatcacatgttagtccctaattacagattctaagacaatctcgcaaaatataagtattcataggttcaagctaaaaagctgcgactgaatctgctctgaatcagtaatagccagaatcgatacagcatgtgagtaagtcattagtaaaactgcttgggcggcagactaaaaaagtagtcaaagctacagaaggaaacaacctataccaattgaccaaggtcaatgacaattagagactagcatctgatgatcgaataaacaaactaaaagaataatcattatcactgatttaatttatataatacgagatggaaatgcttatgcgtatcgctggcgaaatattaacggtgttgacttgcgttgggagtttttacggccatcacaagtacaaccatatttattaagcgatggatcaggtatgtattacaacgtaagttttgatgaacctgaaattggaactaagatgtatattccacaatcagatatgattcatattcgattagcatctaagaatggtggcttgactggtgtatctccactgaagtcattaaagcctgaaactcaattaaaatcagcatcaaataaaatggccttaagagctttaaagcaatcagttatggttaatggtgtgctaaagattaagcatggtgggttgctagattgggctacacgtgcttcacgttctcgtaaggctaaagcgcaaattgataactctaatggtggtccatttgttatcgatgatttggaagactatcagcccttagaagttaaatctaatattgctaatcttttaaaacaagtagattggactggttctcagattgccaaagtatatggtgttccagattcatttattaatggccaaggtgaccaacagagttcaattgcacaaattagcaatcagtatgtaaaagctttaaatcgttatgtgactccgattgtaagtgagttaaacaacaagcttaatattcatattgataaagatttacgaccggcaattgatgttttaggcgataattttgctactactatctctagtttaaaaaaggatggtacattagcaggcaatcaagctcgatacgttttgcagaaatcaggatttttgccggatgatcttcctcagccagatttaactgcagaaatgacagctaaaggaggtgatgataatggaaacactggaagtcaagggaataatcgtacctaatgatttgagcgatgtctatgattggatgggctatgattcagtaagtcctagtagtattagggatgctttgaatcaagctagcggtcaagatattgtggtagagattaattctcgtggtggctatgtggatgcaggatcagagatttatactgagttgaaaaaatatcaaggcaatattgatattcaaattgttggttatgcctgttctgctgcaagttggattgctttagccggcgacacagttgaaatgtctcctacggctcaacttatgattcatagagcatcaggaggggccgatggtaacgttgatgatcttgctagtgccatgcaagggttagatcaaatggatcaagccttagttgatttgtatgccaaacggactggtaaatcagcccaggaagtatatcaactaatggctaaagagtcctggatgaatgctaaaaccgcagtagcaaatggttttgttgattcgataatgtttgaagatgaacaaatgccagctgtagtaaatgctgatggtgtccctattttaagcaaccaagtaattaataaaattaagaacttgattaaagaacctaaactacaaaataaaaataagccaaagagacaagttaagaatgaaaacttgtctctcttattatggagttaacaagaaagaagataagaaatgaacggaaaaacaattaatcagttgcatgatgactggatttctgctggtcaaaaagtaactgatcttttaaacaagaaaattggcttaaatgaaaagtataagtcttcatataattctatgtctgatgaagaaaaagctaatttccggaaggaaatggagcaagctaagcaagattatgatgctgcagttcaagctcgtgattttgctaaaggtacgtttgaagatgctcaagaagctatgaagactatgcctaagccaactaatggtgtacctgtagaaaaacataattctaagagcaactttgccgatgggtttagagatatgcttcgtcatcctatgaaatacatggaaaacatcgctactagtgacccgaatgaacctaacactttaggtttagctattcctgatgatcaacaaactaaaattaatactttagaacgtcaatatgattctttaaaagatttaattactgttgaaaatgttggaactgatcatggttcaagagatttggaaaagctgtcagaaattaagccaatgccacgtcttgaccaatttgatgatcaatctgatggtacaaagaaaaagaattataacaagagccaaaatactgatattcctgaaggggattatccatctattaagaaaattaattatgtaattggtgactatggtgccattttctatgcaagtaatgatttacttaatgattctgatgctaacgttgaagattacttaaatagacacattgcattaaagaatacagttacatataatcatgagattattagcagattgcctcaatcccaaaacaaagctactttaaagactttggatgatattagtgatgctgttatggacttagatatggcactttgggatggctctgtcttattgattaataaatctgcatttaaggctttaaaagaagttcgtttagcagatggtcatcatgcacttacaactgatgcaagaactaatatcacaacgtttaagttagatgaatcaacgtatgcagtagttcgcgtagttgaagatagatggttacctgataataagacagctgcaggcaagttccaaagtcatccgttttactatggtaattttaaagaatttttacacctctttgatcgtcaacaaccacaattacttacttcaaatattgctgcacatgcatttgaaagaaatcaaactgctattagatcattacttagaatggatcttcaagtgtgggatgatgaagcaattatttcaggttcatttgataagattgctagtcaacctctcattttttcatctgtaggggtaccaagtagcactgatgctgctgatgatgcgaataagaagagcggacaataaatagaaggtgatctaaatggccaaagtacaattttatttgaccattaaagatggtcttgaagatcttctaggttatatagatgatgatttaactgaagaaatgaagacccgcatgattacttgcttaaatgcagctgaaagctttgttcaaggttccgttggacctgatgatggtaatttctatcaaaaaaatggcgtaaaaaatctttatactgttgcttgtaattcctatgctgctacgttgtttacctatgcttcaacaatatctgtaagaagagtaaataatgttgatgatgtttgtcgcagcatcattggtcaattacgtggtaaatatgatgctaaagacgatgaggtgaataatgatggtacggaacatcaatccgacatctctaacggtgttaattaaattcggtaaacctgaaatgaaattaaatgaaggtactggaaacactgaaaatactggtattaaagtaaaatttagaacacgcggtagaagatattctttgccaattactcagcaatttgaacattctgatgttaactggcggcaaacttttgtttatgtagtacatcatcgaagagattggtccgaagttacatatgcagagatcaatggacagatgtatcaagttactggaattaatcctgactcagctaatttgcctaatagttatgatcagataacacttactcgaattgtagaaggtgaagagagtgatggataattttgaaaagcaacttaatcagtttatggaagaaataaaaaaacaagtacccaataagaaacaaaaacaggtagcaactttagctggtgcaaaagtttgggctgatagtttatctcatgaagctaagcaaaaacactattctaatcataaggataaagtttatggccatatggctgataatgttaaggtgtcaggcaaaaacatagatggtatggttgatggttcagcaacggtaggctgggataaaagaatacatgcaatgaatgccctgtatactaatgatggaactgtaaaaatgcgtggtgatcattgggttgatgaagctcgaaaaagctttaatcctgaggtgtttaaggctgagatagctgcccttaaggagatggagaaatgatttcaccacctataacagaagtttataaattaatcgctaaacaagattatgattggttagatttattagcatcaggtaataaagcgccagatgcgacaggaaaatatacttcaattcttattcagaatgctgatgaaacacctgatggcatcaggaataatcgttcaactttgattcgatttagaattgaaatacaaattttctttaaaaaaggttttagtcaaaatatttatgaaaaaagacaagtcatagaagatttgcttcaggatgatggctggattctttcagatgaaagacctccggtaccagatcccaaaacacagcaaacttttatgactatttattttataaaaaattataggagaaaataatgagtgaaaaattaggtagtgcagctcatggtattgatttaactattttgagcggtatttcagaacaagatggtcaagttgttaaaggcgataatggtttaactcaagatggtccttatgccgttgatgcaggtattgaaggtgcaactcaagttgaatatcaaactttggaagcagccggtacagatcaatttgctaacaacaagcgtaaacgtactactagaccaagccaaaacccaacagcaacagtaacttacttagacattgattgggatgttttgaacaaggtagttggttatgaagaagatgaaactggtggtgcaactcttgatcaagatcacaaaccacatatttcattgttaacgcgtgaaccactattggacggtaatttcttatatgaagcatttgctaatgctacagcaacttaccaaacttctactcacgctactgataatacagaagaacaagatgccaacgttcaattgagtttaaaggcatatgaaccaatcgcagatgttttcaagcttaagagtggtaagaagatgccttataagaagtggaattcaggttctaagaagttcgatgaagctaagatgcttcaagaagtattccctggaactaccgcaaaaacagtagatgacattcttaaagcaagcacaattaagacctcaagtgcaggcggtaatccaacaccaggtaattcaggtggttctactagtggtacaaacacaggttcaggaactgattcagaaaagaagacagaaaatagtcactaattaaaacgctgggtgggagtggaaggtaaatcgtttttagtcagcaaatcaatttaattattttttgaaaggaaaatactatgccaattcaaattgatacaacaccattttcaagcattattaacaaaaagactattggagttgaaccaacaggagccatctttgataaggctcaagatattcaaattgagttaatggatggagacattaagcgtaaggaaaccttcttggaatttaagaagcgtgatcgtcaaactgctaaagacgtaaaagaatttattaagaagacattgtctttaacaactaagcaatgggataagataaatgaaactattgataatgatgtactaatgaaatttggcatgtatatggctttagctcttcaaggcgctgaatacgattcttatcaagactatgttgattttattaatcaacaagctgaagaggatgctgatacagacccaaaatcctccaatacaaacgaagaaaattagtttttgagttaaaaaatagaagattagataagaagcgtttgcgtaaggaaatgttcttgaagcatggaatagctcctgatttttggaagaaaaccaatgtctttgaattgatggatattcttaatgttccagataaaaatccacaactaccagttgcgcatgatggtggcttttacgataacgctgattgggctgaataagccctttttattttgcgctggaaaggaggaaaaatgagaattcaaaacgtaatggccacgagtatcaaaattgatactgtgagtgctactcagtcattgcgttctatgaacacagcattaaaggcttcaacaaatgcatggaaagccgaagaagttcaagctaaaagtgttggtaactaccttaaggcatctcaagcaaggtatgaaggcctaggacgttcaattgatcaagctaaagaaaagatcaaattaattcaagaacgacaaaaagctcttgatcttacaactgaagatggccgaaatagttataaccgctatgctaagcaacttggaataaccgttaagcagttgagttcaatgacagctcaacaagaacgtgctaaatcagctatgcagtatcaaacttctggtttagctagccttcaatcaaggtatcgatcacttaatgaagttaatagttcatatgtgaagcgattagaagcagaaggtaaaaagtatgaagctgcaaagacaaggttaactagttataaatcagctgtcgaaaatttaactaagcaacaaaaaattcaagagagtgaactttcaagaattgctagtgaatctggaaaagctagttcggcttatcatgctcaagaagttaaagttaatcaaactgctacaagcattagtaaattaaattctaaagttaaatctgctcaatctgaagtaaataaacttaatccaaatggctttaataagattgctaatggtgccaaacatgtaattaatgcagctgataagatgaagtccagcttaaaaaatacgtgggaacacgttaagtctggtgctactgctgcagctgctggtattggagctgtgggagctgctgcaattagtggagcaaaaaaggctggtaacttagagcaatcctataaggaaatcactaacttagccgttactggcggtgaaaaacaaaaggaagcaattaaaaatgtttctgaaatgcaacgccaaggccgagctatgtcaatccagtatggtaagtctcaacaagatattgctgattcctatgaggaattagttaaaagaggatataccactaagcaagcattaggtgctatgcgaaccgaattacaggctagtgttgcatcaggtgatgactttaaagatgttgttgctgtatcaagtacaactcttgagtcatttgggatgcgtgctaagaccacggctcaaatgacttataacaccaagcgtgcagtaaatgagttagcctatgctgctgatatgacttctaccggtttcaaagacttagggtatgggatgtcctatgttggatcatccgctcaccaagccggttttggtttatctcaaactgcagctgctatgggtattcttagcaataacggtttggaagcatctaaagctggtactggattaaatgaagttatcaaccgcttatctactgctactggtaatttgctcaaaggtgacaagaagaatgctcttgcaaaattaggtattaagcctaaagaaattactacttctactggtaaattaaaagatctttcaactgtatttggtgttttaaataaacacatgcagggaatgtcaaaggtccaaaagatcaacatcatgaaatccctatttgggatgaccggagaacaagcaggtttaatcttaactaagtacaacaaacaacttggtaccttatctaagcaaactctcaaagctggtaaagatggagattatgttgctaagttagctaagaaaaactctgaaactgccaaaatgcagatggcacgtcttaagatgactggcgaagccttcagcatgactcttggggcaaaaatgttaccagcaattaatagagctggtgatagtcttgtaatctttcttactaaaacaaaagatggtaagaaattaacacaagattttgctaatggtgttggtgcagttgctaatgggttggttgaccttattaaatgggctactactcataaaaccgaagttaagtggatctttggtggacttttaacaggatattcagttgttaaaggcgctcaatttttacagtttttaaataaaactcggttggccatgtctgaacttggggttttaagtaaatcaaagactgcaattaaaggcgtgggaacagcatttaagtttactgccaaattagcaaaagctggtggtaaagggatcctaacggctggaaaagcatttggaaaatcctttatccaaagtgctaaaggagctggaagtgctattaaatctgttggttccattttaggtaagggagccaaaagagttggtagtgatctagttgattctggaaaattccttggtaagcaattagtaaagggattcaaaggctcggttaagctaggaaaatcaattggatcatctctagttaatggtgctaaatccttagttacaaaatctgtttctcttggcaaaaaaataggttcagctatttcaaagggtgcaaaatcaacttttaaatttagtgaaagcttatttgaaaaaggtaatagtgcaggtaaactaactgggcttctgcaatctgctcattctgctggtggttttaagaatttaactacagctggcaaagtcggaaccggtttagccggagctggtgttgctgttgataccgctacttcaattgttaaagcaattaaagataaagttggtagtcgtaagcagtatgaagatgtcggcacttctgctggtaaaggcatcggtggagcgattggactatggtttggtggtccagccggtgcagctgttggagctactattggtgccaaggttggtaaatggggcggtgacgctgtcaagtcatttaccaacggttggaaatccaagaaaccacctaaaaacttctggagtttagaaaatttaggttggagcacaaaagacactttcagcaaaattggtaagtgggggcaaggagtaggtcaaaagtttggccaaggtcttaataaaggtaaatcctttgctaagaagaacgccaaagagcttgccttaactgctgtttcaccaatgcttggaattccagcgcttctttataagaacaatccaaagttcagaaaatgggctaatggtgttggtaaaagcgtcaaaaagggatttaattccgtaaagaagaatgtaggtaatttcaataaatcagtttctaaaaatgttggtaattttactaaatcagttggtaaaaagtatcggcaattcacttcttctgcatctaagactttcaagaaacattgggatcagatatataaacatagttctaagggaaccacgcagatcatgcggtctactgagaagtttggtaagaactatgtaaagattaataagaagtatggtgatgaaactagaaaaaactttggatcctttagtaaacgattaaagaaaaatcatggtgatttattcaagacaattggtcagacaacaaaaactcaattaaatattgagaaaaagcgttggtctgctagttggaaaaatattagatcctttactggtggcgtttggaaaggccttaccaaaaatgccggtgatatgtataaatcacttaattccaaaactcatggtggcctaggtaaagtacttactaaatttaaagcatttggcaaaagtgttggtgacttctggaataatctttggaagggagtcagggatacttttgatagaaccattaagggattaaaggatgctgcaggcaatgtaggtaagttctttacaggcaaattaaaagtaggaaatattcaccttgctgatggtaccgattggaagaagaagtatggctatcctgcaattgttaatgatggttcagattctccagaaaccaataatcgtgaaggattaattgataccgatggaactttaaagatattccctaatgttcgaaatctaaagtggtggatgttacctggtcaacacgttgttaatgctcatgatttagcaacaatgtttggtagtggtgttcacttagcttctggaacacttgattttgatttgctgaaaaattacaagatcggggatgtaaaaactccaaatctattaagcaaattagtaaagatcaattctcaaagtctaaagctaaaattaaaaacttatgctgaggataaagaacgtcacgaaaagacaaagcgtagacgtgaaaagaaagaccggaaggctaagcgaaccactagaactagaaaaggtatggaatacctggattcaagtttctttactggtggtaagtcaacaggcaagattgtttctgtttcaaaatcatggctaaagaaatatcttgaatctaaacttccaaagagatctaggaaacgaacacgtactactagacataaatcttcatcttcaagatcatctagcaggtcaagaaatacaacaactacacgcagagaaagaacttctgttagtgcaagtgtaagtggattaagttctgtaagaagtttagctgcagcaattaaagctgtatctggtagtcatactgcaaagataactgtttctgcaagtagtgccaaatcagtaaaatcactaaaagctgcattaagtaaagttaaatctaaacgaattaaagtttctatttcaggaactaaatcggttaagtcattattaagtgcacttaaaggagttggtaagaagagtactcttaaaggtattagttctgcatcaagtcgattaaggaccttaagtaaaagaactaaatcaactaagagttcaattaaaggcttatcatcggctaatagtaaggcaagtaaaaccaataagactttagctagtcgattatcaaagactagttcaaaggtaaaatccttatataaatcagccaaaaagaacaaatttggtaaagaaattaagtctcaagctcaaaccgctgttaaatctcttaaaggaaaaggcaattttgctcaaacctttgaaagaatgactaagaagtttgataaagatttaaagattatgtcgaagaattcaagaaaagaatttaaatcgatgtggtctagcatcgaaaaaacttctaaatctggtgaaaatgctactcataaatcacttaacagctttagtagcaagtacagacgtggttggaaatcactagagtctggtgtctcaactaccttcaatcacttctggacgactatgagaaaaacggctggtaagggacttaataaagttatcgatgttcttaattctggtattggaaagatcgatacagttattggtaactttggtggtaataagaacgcagtccataaagttggtggtgtccactatgcaactggtactggttacttaggatcacaaagaagaccaataactggtccaactctagcaatacttaatgatggctttgacagccctgaaaccggtaatcgtgaaggggtttacgataaaacaacaggtgaattatctgttgtaaatggtcgtaacgttcctttggttcttgatcaaagacatgaagtatttaatgcttctgaaatgcgtgatcttggcgtaactagacactttgcttcaggtacaggctggttaaagaagctttatgaggaagccaaaaagttctggaaacaacctatcaaaactgctgaagctaactttggtaaagttactggcttaagtggggctgttaataccttaactaaaggtatgatgaaagttgctactagccaatcaaccaagtggtggtctcagctctggaaaatggttcaagataaagtcaatgatgatgatcttggacccgcatcaggtttattaaaagccgttgaaaaactaggacgcggtacttcttatagtcaagctagacgttatggcccgaattcatatgattgttctggtcttgtatcaaaggctatgaatgagtattatcacaagaattggggacctttaacggtagctggattgtggccacatgctcataaaatttcacgttcagaagcaagacctggtgatccaattttctggcttccaaattatcacgttggagtttacgctggtggtgataaatattggtcagcattttcaccttcagcccatccacaagtagggatgcattctattgcaggatcagttccaggtgtgaaaccaactttcgcacgatttaatggaacaaatactagtggtaatgattcaagtaacaaagatgtgaaagtaaaagcaaataatgctttacaaaaattcataaaacctcaagtaggtaaaggattttggcagattatccagaaaattcatgataagtatggtgataaaggcgtattattaaatggttttgctattggtgaaggtgctcctgcaagagcaaaggcattagccaaagctttaaagcgtcttgatccacgagctactagaaatggtattgccgctattttagggaattggttctttgaatctggtggactcaatccaggaatttccaattctgctggagcaattggattaggtcaatggttagatagagggccagcattaagagcctatgctcgtaggcatggtaaaagttggaaagatccagcaacgcaattgaattttgccatgtatggtgatagtgctaatacatctatttttaagagaatcttggaaggtcatggatcaatttccagtttagcagctgcgttttctagagaatgggaacgtggtggatatgattctcaacatgttcaaggtgctaatactgttagaaaaattcttgggtatgctaacggtggcattgttacaaatccacaaattgccgtagttggtgaaggtaacggccctgaaactatagttccttgggatattactaagagagctagagcttataggctgatagatagaaccttaaagcatttcaagcaacaagatgctccaaccagtcaaggtgaagattctaagctactacttgaaattcttaaggttatgacatcaattgaaaagaaacttgattctgaaattactgaaacaagaagattaggtgaacaaccaatcaatgtatctggtgactttaatgtagatggtcggaagtttgctagatacttaagaacttatttaagagaattcgatcgccaaactgttgttagagggaggtataacttaagtgacagataatattggttatattagctatcatggtaaatctagtgccgattttggttttggcataaatattgatagtaaaagagtgcattcagcgccaaacttaacttttaatcaaataccatctagctcaattgaaaatattttcagcaatgctcacagcagaagtcccactgatgtgagcttttcttgtacaatcgatcgtccggaaagatttgaagacatggatgatcttgaagatgcagtaatggattggcttgatggaagcgagtatgctccacttagattgagttggaagccgacgtacatttatatggccatagtaagtacagcaccagattttactcagtctcaagatgatatggaaagccatgagattgcaacgattactttccatatgcagccgcttaaatatcgtgctgatgggtattactggcagtctttgcctaagaatggacaaattgttaatcctgaaagattgaaagcttatccagattggcattttaaaggtactggtaattttgtattaacagtaaatgggatgccgtatcaatttaacaatattgatggggattgctacctggacggattgtcagcagattgttttcaagatcaggcaacgtctttaaatgaaaatgtcgtgcttacaaataacgatgcaccagtttttgagcatgggcttaatacgattaagtttgaacctcaaactgatgcttctttagatttaattgaatggaaaccgaattggaggcgaattctttaatggttgaaactgcaacttttgatcaattgaaacaagaatatggtgcttcagaagctgatgatcaagcagatacagtttactatttgaggcatccaattctttatgctaatgctgttgatgatgatgaaactaatggattaggtcctttgccggactttgaatcattaacaatcaatagtgttacttctcaatatccaacaggtcagggtgtttatcctattgatggaaaaaactttgataaacttgctgaacgtgaagtaattatgactgatggaggacctgatgcattgcatcagaaataccggatcatgaatattactaaaacggttggctcagaaaataccgttactattgatctaagacatattgatggtgacctagctgacttaactattgatgataatattcaacttcaaggtgcaagtgctattgaagcatttaatgcgatcgatcaacatttaactgcagcaaatccaggtatcagatttgattctgatgttagttcattatctgatgttaatttttcaatggatactccagctggaaatttacttactgatcctgatgctgaaggtgattcagcaactcaatcaattcttggtttgttcggtggcgagttagtttttgataactggcagatccatcactatcaacaagcaggaagggatatcaataagcctttaaaggttggtcgtgatattcaaagtctttcatcaacaactaatgttgaaagtacttatactgcaatttatccctatgtaacatataaatctgcacctcctcaggcaacagaagataatgttgattggagtagttatgctactaattgggattccgttggtaccgttgtttatcatggtggcggtggtttaccaatatatgattcacctgttactggtcagcatcaaattgggacagttgaaaatggtcaaaagatcaagttaggtaccgttgttcatgatggtgattcaactccagtcgatgctgatggtaatattggaaaagttattacaactgttggtggccatgattggtatccaattgaaggcggtggctggatagatgctcagtggattcatttcgataaaactggagactatattgttaatcctgcttctggtcacgttactgtagatgcttcaggtactaaaacagcaggaactaaataccctgcttctggtcgtgctgttgttacctattatggtaatggtgataaaatccatgtttactattctccatatcaaggtggcgatcactacagaactggtaagactttaaagaatggtcaaaaattcacttatgattatattgcctgtgatgaaaacggtaatttgtggtatcgaatcggatcccatgaatggatttatggccctcacatttctttaaataaatcaagttcatatgcttcttatccatcacacggtcgaggcgtgatgaagaaaaatcagcaacaatatgtaatgaataagaagaccggtcgaattgagccatctaagaagcaaataaaatgggtttcaactagaactaagcgaacacctaagtacttaaaacgaagaagaaatggaaagacttacaaaatcctcaatccaagatataaggaatacagaaagaaaaaggtcagaacaacagttaagcgtggagtttataatttgaattatggccagattgtccagggtggcgtaacttactacaagacaagtagtggtgtttatgctaagtcttcaagttttgattggaaagctgaccagtctgtaaaaccttatggaccatcaaagattttagctcaaactgcagatatgaaaggtaaggttgaagtttattcggctccaaccaaaggctcagctgttaattgggctttgaaggatggtactggtgttgatgtagtaagtactgctaaaggtgctgatggtaaagagtggtattacgttaagtatgatggtgacaaatatggatacatccctgcaaaacttactaatactaagggagatatcgatgaagaaccacatagtactgaagctgattctgatacagatgatgattcaaatagtactggtcaagatgcacaaaccattaaagtaactttacctgaaaagattttgattgctgataactgtattggcattgaaaatcaacgtgttttgaacttagatttaagttcattctttaagcatgattacaatgatacttcaggcttacaggctgatggtacttggcaaatgactgatgaagatgtatctcaattacgtgaattagctaatgatgctatgattgaacatcaaattggattacctccaacttcaattcaagtaactgcagaacaaatgaaaggtgatttagattttttaaatcaagtttgtttgaatgatcgaattggtgttgaagatgataatgctggtgttcacactacagcagaagttacttcaactgaatgggatgcattgaatcatagatatatttcaataaatattggtgatttacctaaaacctggcagcacttattgaaagagcaaactcagcaagaaataagacaagctactagcaacactaatgaaagaatcaaacatagtgatactttgattggtcgtgcagaatatgccttatctttggaaggtgatgctagaagagcagcacttgtagccatgatgaagggattaaaacttacggataaaaatggcaagccattagtttcaattaaaaaattcaataaatacttgactgaatggtcaggtaaggttttgaatcttcaaaattgggttgatggtacgaaagatgccgttatacgtggtgtagatgctgatggaaaaatcgattgggaaaacgcagtcgatttggtagctaaagatgaaaattctgaaatgcatttcaatgtaaatggcttgtcctatcgcgatccaaaaactcaaaaaataagaactgccatgggtagtgatggttcattttatgcagaacatggtatttttggagatcttatcactcttaaaggaacaatggtacaaatggatgcggctcttagatgtgatactggcggttttgaaataactattggacaaaccaataagtatgaaactggaacattcgactctgaaaaaggattgacggttggtagtaaaaattatgctttgggcttgagctctggccaattaatcatttcatcaaaagaaggaggattacatactggtaattatggaccttcttatttgagattgatgtctcctggagggcatgaactggaattaaatactaatacagcaacttttagatatgatggccaaagatttattactagttctgacttagaaaaagtattaggtgaattgcaaagtatcaaatcgttaatggttactcatgatgaaatgaataagtccatagaggattacctaaagactcaaactaaaggaaagaagtaaataaatgaaaaatgatgataaagtaattgcacattttggaacagaaatggcaaatataattgctgaacaagcgttaacgatttccaagttaaaagttttgctcgagcaagaacaatctaagaatgctgaattaaatattcagattaaagcattgcgaaaggaagataagcatggccgatctgatactaagcacaaataaggcttattcaaatgctgaactgattagagtaaggcaagacgattatggtcaaaccattacggctttgatcactgataaaaccaactcaccaattgatctttcaaaggctgaggtttcatttaacgtgaaagattggtcaggtgacgtaatcagtgataaggctacaggggatgtatccggcaatgctacatacgcaattaataagagtgtggcacttgctacaggttcagcatggtttgaaattaaaaataatgatcaaaaagttgcaactcaatcattttggattcaagtcatggaagcagcagaaaaagttgtacaaatggccgatccatttggtggcgtttcaacaaattaaaagaatcaatgattaatttcgttggctctttttgattagaaaggaaaatttatatggcagttaaagcagatattacgattgatattgataagcaagttggtgaactgcaaaatctaacacagatttataatgcacgtgttggtgataataagacaccactgacaatcgcttggcgtaaaaatgatttgcctttaaatttaaagggattacatgcctacattgttggtaaaactggtgatggttcatataacagtgaaactggaaaaattgattttccaattaatactcctgtttctcaatttgaagatgatggatcaggaactttggatggtggccaaagtggattaactactttgctaattcctaaacaaatgtggcagaacagtggtttatttgctggatatattggcttgaaatcagaagatggttcagtttttacttccaaagatatttggttcaaagttttaggcaacgttctggatgccggtgtagaaataaattacttcattggtgattttgataaagcattagcagaagcagaaaagaagcttcaagataagactgatagttttgatcaaattaccaatgcagccttaagtgatttacgggaaaaatatagagaaatagcacaatcttcagaggatctggcttcagaatataccgcaacattaaataatattaccgactctctaaagagtatgcaggcatatattgaaacacataatattgttactacggataaatttgaaaatctggataagtatttaactaataaagttgctacttcttatgttcaacctcaagcctttaacaatttagatgatttaaagcaaaaatatccaaatggatcaaatggtattatggtaaccactgacaatggccattattatttatggaacaataattcttggaaagactgtggaacatatcaaagtacaggaattgcagataagagtattcatttagaaaatttaagtgatacattagaaaatagtctttatccaaatgttgatgaagttgaaattacaaatctactagatgggtatttttcaaaatatggaactgtaattactcaacataatgcctctgatggtgaccctgttcatacagaaaaaattccagttaaaccgggcgaagaatattatgtttacacaaataattattgggatggaaaagcaattaatatgatggaaaatgatactattattaattatttcccatctgaaaatgatgcacaaattaagtcaataaaaattaccataccgaataacgttgattcgttaattcttaatgggacaaaacaatttgttcctcgtctgtttaaaattaatagttataatcaggatcaagatgctatagataatctagcaattattttaaaagataaggaatttaattttaaagaaattaatttaacacaaattaataaaacaggatattgggactatacaagaaatggaaattatacagatcaggctcctgataataaaaatgcaatgaaatcatatcttcctgttaaggttaagccttttgagatttacagattaacgggttgcagtgcatggaatgctagactttatgaaattatagattttcaaggccatctgatttcttgttgtgataatgaaaatagtcagagtcttactacaactttcatgattccaaagaatgctgcatatcttgaagttaatgaatatttcttaaatgtacaaacaaaacttgaaaaagctgtttcgattaaagaaaagaagcctttggacggcttacattggggagccatcggtgattcttggacagccatttttgataaagatggtaaaagctatgtcaatgatgtagcggacattacaggcattacagctactaacttaggtgctggaggcactggttatgttactggtggcgcgaataattggaacaatcaattctttaagcgaaatattgatgctgacactgatatatgtactatctttggtagctttaacgatgcttattatcctgattttaaatttggacaaaaaggtgatactgatacagctactatgtggggcgctatgcttgcaacaattaataattgttataagaataatcctgatgttctaattggtattatttcaccaggtccatggggagcaattaatccatttaagacagatacaatgtcaaagctaaactcacatagtgatactacagttaacaatatggcaattaatgatttcgcagaaaaatatgtacagactatgaaagaatttgcccaaatgtactcactaccttttctagacttgtaccatcaatctaacttacggccatggaatgatgacttcatcaacaaatattatcatggtcaaagcgctacagatactacgcatcctaatccaaatggactaaaaaaatatatagcgccacgaattgcaagttttcttgaaaagattatcaaatgattggaaggtgagccttatgatcaagcgttggcgtaaattgagtgcgctagaaatgtttgttaatctaggacagctaggcatttcactttgggtgattgctatcggctgttttttaattggggacaaacattactttttctggccaccaacttttagaaatattgaaaatgatacaagaattgacatgctaattatccttgttggattagcactttttttatgcactatttttctagttgaaaataaatatgtcattgtaactctatttactttagttggtgcaatttcattagcacttgctgcactatcaggattacatgcttattttgcaggacattgggaaatgggtatggatgtggcacatgaattagcactgtttggagcaactttactggtcggccactttaagtgaggtgattcgcttgcaagatctaagtaacttgatagcaagtattgcagctttaatgggggcagttagtgctttctatcaggtaatcatgaaaaacaagcgaaatcctccaagtgatgaaaaggaactggatgaagctaagaaagaaattgaagatttaaaaagtgaattgaaggggaaaaataaagatgaaaactgaaatcgtaattaatttaatttgggctgttgtacttgttttagcaatgtttattggagcatggtataagaataatcaagctaaagttgaaaagatcagacttactcatcctgaaatggggcatgtccttgatattgttgggatgcttgctctaaaggcttccaattatcaggaaactcaagatgataaaaacggtgatcaaaagttagatgatgcaactgattcagcatacaatcaaattaaagctttatatccagctatttctattagtaaagatacagttcgtaatatggtgcaatttgcgtatgatacaattgtggccaaaacaaatactgatctaaaacaagaacaaaataatatggccaaagttaagaattcagataatgccgagcaaaagaaggatgatattgtaaatgattagtaagaaaagttatggagtagatgttgctaaatatcaacctgagtcattaagagtatacgctaaagctggtgctaagtatgccattgtccaggtaagcgtatctaactcaattgttgctcctagagcaaaggcacagattacaagtgcaaaagctaacaatatcatgccaatgggttatttttatggctgctttggtcatagtgctactcaagccgcgtcagaagctcactttgcaattaagaatgcaaaaagtattggattgcctaaaggctcatatcttggtgtagactgggagagaaccgataataatgtgaacggcaatgttagtcaaaacactgctgctattattcaagcaatgaaagttattcgtgatgctggttatattcctctcttatattcaggggcagatttgctaagaaataaaattaataccaagcaaattattaaacagtttgggacttgcctttgggttgcttcatatcccgtttccagtcgtgtgaatactgctaattttaactacttcccatcaatggatggtgtagcgatttggcaatttaccgataattggcatggtcttagcgttgatggtgatattaacgttattgacttaaaaggtaccacaaaaaagtatgcttcaaaatctaagtgggttaaaaaatctggcacttttattttaggtgaagctttaaagattcatacttcacctcatattaattcacctgctattgctaagttgcaaaaaggtagtgtgattaaatatgatgcaactttacaaggaccactgcgtctttggttacgacaacctcgtaacaatggaaaatatggctatgttgttggtaaagataagtatggaaaaaagttaggtaaattcaagtaaatcatagctgctgagagcgtgattctatgacgctcaaattttgatttgattaaattattaaacttggcaaaagaaaacattagcaacttactataaagaaagatccgctctaggggtaaaactctagagtggatctttttttgcgttttattttaaaaattatgaaaaatcattataatctattttataattcggtttaagattgaaaaccgaaaaaaccgaaaaaaaaccgaaaacttcacggaatttggaggattttgaaagaatgacagagaataataaacaagccaaaaccactgataccaagggaaaagccaactgcgacacagcaatcttcgctggcggttgtttttggtgcatggtcgaacctttcgatacagttgacggagtagaaaaagtagtttctggttatactggtggtcatgttgctaatccaacatatgagcaagtctgttcaggtacgactggccatactgaagctgttgagattacctttgatccagcaaaaatatcgtatgatcaattgctaaactattattggcaagtgactgatcccacagatgcaatggggcaattccaagatcgtggtgataattatcgacctgtaattttttataattcacctgctcaaaaagaagcagctgaaaaatctaagcaaagattacaagctagtggtaaatttgataaaccaatcgtaactaaaattgaaccagctaagccattttatccagctgaggaatatcaccaagatttttataaaaaagatccacttagatatgcaatggaagaagctggtggaagagctaagtttatcaaggaacattgggattaataaaaagcagatcataactgttataagctgtgacctgcttttttactttcaatattttagattatgttaactatttctttaagttgcttttgataacctcgattggattgagccaagttccgttgttaacgttccaattcttacatggaaaaccatatttgtttatgtaatctttatttgtttgagtaacgccaaggtgtaagtgtgagccagttagcttaccgatcttttgacctaatttaatcttttgaccagtcttaacataaatgtcttttttcttattaaacccttcttggtaaacttcaacgtaattatcaggactaataacccagatgaaccagccaaggccgttgccataagcaacctttttaacagtaccttgatgaattgcatatacgttagaatgcccaacttctgaaaaaccaaaatcccaaccatcatgaaagtaggaaggtggtgtagtagaacgcatatagttagttatgccaaaagtttgtgcattatacattggacgaacaccatttttcttgttggctttaaacggataagcccacttgaggttcttgggttgaacttcagttgtattttgtgagtcatcaagcgtatcagcagaagcagtggtggttgataaaccaacgcttgaagttaataatgcagtacctaacaaagaaattattaatttacgaaatttcattataaaaagaaaccagataagttctgatttttatctcctctcttaattcacctaaactattgtagctcagcagttttacgagaaagttacaattaaatttcgattaataacaaaaagttagtatgagtatatgtgaatatgtttttaattacgagtctaggtatttttgaaatttctttactttattttgggatttacatagaattaaattaataacgtttacattgaatttagtaaatgatagtagacattaatttggctcaaaaataataatttggacaatgaaagtgaaactgtcaaatcttttgtgtaaatagatctttctcgtaaattgattttttaattatttatttaatcaaagtaggattctaaggtgtcctgaacctgaccaaagcctttatgaattcgattgaaataacggtcattgtagctcattgcctgaatgccaataaaagcatcaagcgactgttcagttggaaactctgccttaggcttagctttgcgcttgatcacattgttaaatgattcaatcatgttagtcgaataaattgaagctctgatctgcttgggatagttataaaagaccagcagatctggttctatgtctttcaagcttctgataacatggctgtaaaccttgccccatttggtatagaagtcatgcaggacagctgtggcttcttctttgtttgtctgttgatgcacctgtttgaattcgttcatgatcttttcacgatcgtcgacgcgtactttagcgcagatattgcgcatgacatgaaccaaacagcgttgaaaatgagctttaggataagtcctggccaaggctgttttcatgccaacaacaccatcagaaagaaaaagctcaacttgctttaagcctcgggatttcatgttttgaagcatatctgtccagacttcaatgttctcgctaggcgcaatgcagtagtcaatgacctccttgtgcccattaggcttgatgccaatggcaatatagactgcttcacgctcaaatgtttctcggcgcaaaggaaggtatgccgcatccaaatagacgcagaaaaacttgtcgcttagcttgcgtttgtggtaagcctcaacctttggaatcatctgcttggaaatatttgatacctgagctggactgtaatggctgccatacatcttttcaattagatcggctatttccctggtggtcacgcccttggagtaaagcttgataatcatgctttccaagatatccgagtgctgcttgtagccaggcagcgtgtgctgatgaaattgaccgttgcgatcccgaggcacttgcacttcaattgggccaaattgcgtatcaactttgcggaaataagcaccatttctagagttgccagtattccagccatttctggcatagggatcatagcccagaaaggcagtcaattcagcttctaacaagttattaacagcctgttgtagctctttgcgcaataaatcatttattttgtctggattgaatagagcttgagcaaaatctttggtaaaatcattcatgaaggagttcttctttctgtatgtgtttttttgttcaaaccaatcatacgagaaaggaactcctttttctaatgtttaaagaaataaatttaaggaatcattcatccttacacaaactattttacagtctcgaagatgttcttccagcaaatagtcttttatatcaaaaatatactgttttggatgaattaaataaaatcccggatttaaaattgaagtgcaacactaagtgttaaacaaaaaggccatgaagacctaaacttgaagtgacgaaaaatcaagaaaggaagatctttatgaccaattcaaattctagcatttctaagcactatcatcaattaaccagcgtacaacgtggacaaattcaagcaatgctggattccggcataacttcccgtactgttatcgctcaagaagtcggctgccataagtcgacaatcagtcgcgaaatcaaacgcggaagtgtcctgcaaagagacagcagctatttattgtatgagcactattacgctgatactgcacagatttattatgagaagcgtcgcaaaaactgctatcagcgcaatccattgaagcattatgctgtctttttgagaatgctctccagacgctttaaagctaaatttgatgccaccagcatcgatgagttcgttggtgaattcaaaaggactatgccaggctacccttgtcccagcacaccaaccgtctatcgctatattgatcagggcttgctggacataagcaatattgatctgcctatgaagctcaaaagacgcaggaacaagcgtcatcacagccatggcggtcacgctttgcacaagaagcatcttggcaattccattgaacagcgtcctaaagagattgaagacagaaaagctccgctgcactgggaaggagatctggttaaaggcgtcagacgcaagaatcagcctgctttaatgactttgactgaaagaaccacacgctttgaagtagttatcaagattcctgactatcgggcaagcacatgcaaaaggctgcttcaaaaggagattgacagacatcctgcctggtttaaatcaatcacgtttgacaatggctctgagtttgcggatatgaccaagatcaagggctgccagatttactttgctcacccatattctccatgggaaaggggcaccaatgagaactgcaatggtcttttgcgtcaattcttccctaagggcaagagcatgaaagacaagtcaaaagcttatgttcaacaggcaactgatgccattaaccacaaatatcgccgaatcctccaatatcacacagcagaggaactcttcaagcaatatatctcttcataacctaactgttgcacttaatttgacaattcagggaattaaataaaattagtgtgaatgggaagaaattatctgttagcgtaaagcaagaactttatgaggacttattcaaaaagaataatactgtctcagctaagcagcttaaaaattggttaatagaaaatcagaaattgccttatatcaaaattaaggggttagctgatcaaactaaatttaattctagtttatctacatacattaaattaaaaaagtcaggtttatttgttgataaacttgactcaaatgaatttcgtgatgattttgaaaaaattattgaatggtcaactatttttgaagataagcagatttatatacaaaagcttcaaacaattgattggcttacagcaaaacaaattcaattcctacaaaatattagacttcagggttggggcagattatctaaaaaattgttaactgctattgtagattcaaatggtcaaaatattattgagcagttgtggaatagccaacaaattttcatgagtatagtaaataaagcagatataaaaggcacaattacagatgcaaatcaagatctcatgcattcaaatagtatggaagatattttatcagaagcgtatacttctcctgcaaataagaaaatgattaggcaggttgtaaaagttgttcatgacattcaaaaagctgcttctggtcaagcacctaaacaaatagctattgaatttgcacgtgaaagtagaagaaattctaagttatcacaaacacgagggcataagctacaggatatttaccaaaaaatatcaggagatatagtaaataaaaatttgaaggataagctggctgaatatatcaagaataatcaattaaataaagataaatattatacgcgtggtgctagttaaatcgttttagttaataaaaaagtccaatcttgttagactcgacttgtaaatagtaataatagaaaagagtctgatctgattgaactgccttaagcttaagcgttttagccaccatttacaagttagttttaaagatttagtgataatttgtcggcactggtatcgtttgtatgcaccggctgagtttactcatcggcgaaatattgatcaaattaaaactacggacagtctgattttggctttacttatctggcaagctaagacaggaattgaatcacaaagaagattctgtgaatgtttcaattgtttatcacactcacgttttaatcggcgttcacgtcagctattgcaattgatttatcagatacggcaagaaatgaataaaaaggttgacctgaatggacagttcttgatcattgacagctttccggtacctgtttgccaaccaattcgaaactatcgtgctaaaatttttcgcggttatgccaacattggttataaggccaccaagaaaatttacttctatggtttcaaagttcatgccattgttagcgatgacggttacattcttgattatgtcgtaacaaaggcatcagttcatgatgccagggagacagttgaactgatagaaaatacccatccatctaattactatcttcttggcgacgaaggctatttaggcaaagaactgcatcaacagctaaaacaaatgggttacgaactttggacaccatatcgtaaaaatatgacaggagctaaaaagcacaatgatcatcaattgatggctattcgcagaacaattgaaagcgacttttcgcttctgacctattacaatgccgagaacaatcgagcacgtagtctgataggctttcaaagccggttggaaattgcaattttagcttataatttggcttattgtctagaacgatttaactagcaccacgcgtaaatattatctttatttcatgcaacttggaagagatgcttatactggtaagccaattaatattgatgaagtatctcagtattatgacatagaccatatcttgcctcaaagttttattaaagatgattccctgaataatcgtgtgttggttgctaaaccaataaacaatggtaagtcagatggagttcctttaaaactctttggtgataatctagctactggtttagggataacggttaagcagatgtggaataactgggctgataaaggactgattaataaagcaaaacaaaataatttattcctagatccagagaatattaataaacatcaagcttcaggttttattcgtaaacaattagttgagacaagtcaaatcataaaattagcaactacaattcttcaagctgagtatccaaagactaaaataatagttgtcaaggctagttctaatcactatttacgtaatgagtttgatttgtataaaagtcgagaggttaatgattatcaccatgcaattgatgcatatttaactactatttgtgggaatctactgtatcaagcgtatcctaaattacggccattctttgtttatggtcaatttaaaaagtttagttctgatcctaaaaaagaaaatgaaattttaaaaaagaccaaaaattttgactttgttgccaaacttttgggtagtaaagcaccaaatgagatcagatctcaacaggggaaagttttatttgaaaagaataaaattcgattgcaacttaataaggcatataattacaaatatatgcttgtatctagagatacgacaacaaagaatcaagagatgtttggaatgactatatatcctcgggctgaacgggatatagcgaagagtcgtaaattaattgaaaaacgtaaaggattttcaacagatatttatggtggctatactggtactgcagcagcctatatggcaattgtaagaattaataagactaaatcttcacagtacaaagtaattgctgtacctatgacgaagcgtgctattttaaataaagctgaaaaagaaggtaactatgaaaagattctaaagcaaattttatcaccaagtattttatacaacgataagggaaaacgaaaagcaggagtaatatcatttgatattattaaaggtaaagttccatataaccaggttgtgcaagatggcaataaaaaatttttgttaaagagtgctatttatttatgtaatgcaaaacagttggttttatcagaagaggcaatgagagtaattactggtcattggctagattctgataagcaagatcaagaacttttggatgtttacgatgaaattttagaaaagattgatagatatttacctttgtttgacattagagattttagaaataaattacataagggtagagaaaaattcttgaaattaaacgctgaggataagtttaaagctattattcaaattttgaagggtttgcatgataattctgatacaggtgaacttaaagatattggtataactgtaccatttggtcaacttcaaaataattctggaattacattatcttcggacactattttagtttatcaatcacctactggtttgtttgaaaaacgcgttaagatttctagtttataaaaataaatgaggaaccgacatgtggttcctcatttttacataaaaaaagtccctcgatagctcgggacaagtgttgaaactctgcgtactaaaacgcattgcttgattttaaattatgattgttagatcaataaggttaagagttgggagctacccaacaaataaataatatcattatagatatagatgtacaaggagaaaaaatgggatggcgtaacgtaataataactcagcatgcaaagctaacatactctatgaatatgcttatagtccaaacaaaagatggtattaatcaaatacctattgaagatatcaatttggttttaatttcaacatcacaggctgtgattactagtgctttgataagtaagttagccaaaaatcaatgcaaggtaatctttgttgatgataaatatcaacctgttacagagacagtgaattattatcctggggctagggacataaagaagttgaaaatgcaatttgaatggaatgaaagaagaaaagaaaatttatggaccaaaattgtagctgctaagctaaaaaatcaaatatcggtgttaaaaaattatcgaattgatgaaactgaagttgagcaagagctgtacaagttagaggtgaacgatttatccaatagagaagcagcggctgctagaaaatatttcatgaagttatttggtaaggactttattagaagaaattccggagtgattaatgcagcactagattatggatactcaatattgctttcatccttcgatagagaaattgcaatgaatggatatttgacttatctgggaatacatcatcattcagtggaaaatcaatttaatttagcttgtgatttaatggaaccatttagatccatagttgattattgggttaaggcacacgaaaatattaccagttttacaccagatattaagtatggattagttgagttgcttagcttacaaataaaattcaatggtaggaatacaattttaacgaatgcaatttctgtatatgtaagaagctgccttagatatttaagtggagaaacagatgatattagaatagagatgagtttgtgtaatgaggtaccgaatgatgcgattaatgataatgtttgatttgcctacggacactgccgctgaaagaaaagaatatcgacaatttagaaaagctctaataaatgaaggatttttaatgattcagttttcggtgtatgaaagagtatgtgtcactagacaaacagctaattttttagaaaagagaataagaaaatttatgcctagcaaaggtgttgtgcaaagtctaatggttacggaaaaacagtacagtgatatgcatttcttggttggggatgcagtaaaagatattcgcaatacttcagacaggacagtgatactatgattgtttcctatttgtcacataagaaaatctgtttaaaagatggaattaatgttatttgcactcaaagtcccattgcctataaagatctggttttaggttttcaagccttaaatgatctaatagtatgttctgatgacgaatacaacaataagtctattagtaagagttttgattttgtaggagccccgttgttaaatgacaatattatggcaaagtatatgaatgtcattattaagaactttatttctaacttggatgaggtaaacagaaatagaattttaaaatctttttattcattagaaacagtattgaatgattctttgcttttggaagatttacctttagaaattgattttagcgaagatattaaaaagctgttgaaaatggttaacattcatttagatgctcaattaatgttaacgagactgtaaaatagtttgtgtaaggatgaataattccttaaatttatttctttaaacattagaaaaaggagttcctttctcgtatgattggtttgaacaaaaaaacacatacagaaagaagaactccttcatgaatgattttaccaaaaatatagcacaagctctattcaatccagacaaaataaacgatttattgcgcaaagagctacaacaggctgttaataacttgctagaagctgaattgactgcctttctgggctatgatccctatgccagaaatggctggaatactggcaattctagaaatggtgcttatttccgcaaggttgatacccagtttggaccaattgaagtgcaagtgcctcgagatcgcaacggccagtttcatcagcacacgctgcctgactacaagcagcactctgatgttttggaaagcacgattatcaagctctactccaaaggcgtaactaccagagaaatcgctgacttgattgagaaaatgtatggcagtcattatagtccagcccaagtatcaaatatttccaagcagatgctccccaaggttgaggcttatcacaagcgcaagctaagcgacaagtttttctgtgtctatttggatgcgacataccttcctttgcgccgagaaacgtttgagcgtgaagcagtctatattgccattggcattaaacctaatggacataaagaagtcattgactactgcattgcgcctagtgagaacattgaagtctggacagagatgcttcaaaacatgaagtccagaggcttgaagcaagttgagctctttctttctgatggtgttgttggcatgaaagcggccttgaccaggacttatcctaaagctcattttcaacgctgcttggttcatgtcatgcgcaatatctgtgctaaagtccgggtggatgaccgcgaaaagatcatgaacgaattcaaacaggtgcatcaacagacaaacaaagaagaagccacagctgtcctgcatgacttctataccaaatggggcaaggtttacagccatgttatcagaagcttgaaagacatagaaccagatctgctggtcttttataactatcccaagcagatcagagcttcaatttattcgactaacatgattgaatcatttaacaatgtgatcaagcgcaaagctaagcctaaggcagagtttccaactgaacagtcgcttgatgcttttattggcattcaggcaatgagctacaatgaccgttatttcaatcgaattcataaaggctttggtcaggttcaggacaccttagaatcctactttgattaaataaataattaaaaacccggatttaaaattgaagtgcaacactaagtgttaaacaaaaaggccatgaagacctaaacttgaagtgacgaaaaatcaagaaaggaagatctttatgaccaattcaaattctagcatttctaagcactatcatcaattaaccagcgtacaacgtggacaaattcaagcaatgctggattccggcataacttcccgtactgttatcgctcaagaagttggctgccataagtcgacaatcagtcgcgaaatcaaacgcggaagcgtcctgcaaagagacagcagctatttattgtatgagcactattacgctgatactgcacagatttattatgagaagcgtcgcaaaaactgctatcagcgcaatccattgaagcattatgctgtctttttgagaatgctctccagacgctttaaagctaaatttgatgccaccagcatcgatgagttcgttggtgaattcaaaaggactatgccaggctacccttgtcccagcacaccaactgtctatcgctatattgatcagggcttgctggacataagcaatattgatctgcctatgaagctcaaaagacgcaggaacaagcgtcatcacagccatggcggtcacgctttgcacaagaagcatcttggcaattccattgaacagcgtcctaaagagattgaagacagaaaagctccgctgcactgggaaggagatctggttaaaggcgtcagacgcaagaatcagcctgctttaatgactttgactgaaagaaccacacgctttgaagtagttatcaagattcctgactatcgggcaagcacatgccaaaggctgcttcaaaaggagattgacagacatcctgcctggtttaaatcaatcacgtttgacaatggctctgagtttgcggatatgaccaagatcaagggctgccagatttactttgctcacccatattctccatgggaaaggggcaccaatgaaaactgcaatggtcttttgcgtcaattcttccctaagggcaagagcatgaaagacaagtcaaaagcttatgttcaacaggcaactgatgccattaaccacaaatatcgccgaatcctccaatatcacacagcagaagaactcttcaagcaatatatttcctcatagcctaactgttgcacttaatttgacaattcaggaaataattaaaaaatcaatttacgagaaagatctatttacacaaaagatttgacagtttcatgttaacaccatatgctataattgaaacagttcttaagattcatcaagaatataatcttgatagtattcccgtgttttgtaatgtagctcattaccttgatgaaacacagttaaaagaacttagtaagattgttagacaacttaaattgaaaattattttaattgaattcacagataagaaatatggggtagcagtcaaggatgctcaagttgcatatattgatcgagatcttgttgattggtattagacaattgattaaaaagatattatgaaatatcggttttagatgattgttagatcaatgaggtttagatctagaagatggtacaaataaaccattttctagttttagatgattgttagatcaatgaggtttagatcaaatgcttttcacgatggaccggatttatagttttagatgattgttagatcaatgaggtttagatcaatgggcgacttcttttattgttgggaaacgttttagatgattgttagatcaatgaggtttagatcccactatcgcgcctggaatacctgttttctgttttagatgattgttagatcatgggagtcagaacagtaatatgcataaatttacaaatatttttctgtaaataaaaatcgctctagagaaactctagaacgatttttggacatacttgatcttagtatctattattacttagcgtaatcatcaatacccaagtgctccaaaataagtgcggcagtttcttcaatggagcggtgagcaacattaattacatagcaacctaatttcttataaagtgcttgtgctgattcaagctccttgttgattgaatccatattagaataagtagtatcaggattcaaaccataagcgatcattctttgacgtctgatttcgttcaatacagatggatcgttagtcaagccaataatcttcttaggatcaatttcgtagatttcttttggaatgtgagtttcaggaacaagtggtaaattagctacctttaagttcttattggctaagaacaaagaaagtggagtcttagaagttcttgataccccaagtaaaacaacgtcagcttccaagaaaccttttggatctttaccatcatcatacattacagcgaattccattgcggaaattctgtcaaagtacttttgatttaagctatgctgtgcaccaattttttgatctggtgtcatatgagtagtttgttgaattgcttcaactacaggtgagaagatgtcaacacattcaacattatgctcacgggcaaatttgataactggcatttgcatttcatctttaaccaaactgtagataattaccaagtttggatatttttcaatttctgttaaaacttcgtccaacttcttttggttagtgataaaggggtaacgacgatagttgatattgcagttaggaaattctgcagctgcagctgtggcgttactaaaagcagtgtcaccagccgcatcagaaataataataatgtttaattcattttggtcttttgtttctaccatattaagctcctcgtgtattattaaatatctttctgaaaataattatactattaatgaaagcggattaacaataaaaactcagctcttttattaaggtaaagtagtcggtttacttaacttaaaaatttatcaaaaagtttttgaattgtattgaccctaaagattagtttggtataatttaagtaaatgtatggcgtaacgccaagaaatggaaggagggatcacacatggctaagacaatcgttcacgaaaacgagtctattgatgatgctcttcgtcgtttcaagcgttccgtttcaagaagtggtaccttacaagaataccgcaagcgcgaattctacgaaaaacctagtgttcgtagaaagttgaagtctgaagctgcacgtaagcgtagacattattaataaactactgagaaagctacctgtttttgggtagcttttctttttgacttcttgaagcataattttgattatgttaagtaaatatttgttagttttattttagttaagaacatagtttgttataatactattgggtttttaatagaaagaaggatattaaatgagtttgtcagatcaaatcatggctgatatgaaatcagctatgaagaatcacgacaagacaactcttaatactgtccggatgatcaaatcggccttaatgaatgaaaaaattaaagcaggacacgatttaactccagatgaagaattaactgttcttaatcgtgaaaagaagcaaagagaagaatcgattgacgaatttattaaggctaatcgtgatgatttagctgaagaaaccaaaaaagaattagcagttgtagaaaagtacatgcctaagcaaatgaatcaggatgaacttagagcagctgttaaggaaacaattgatgaagttggtgctaaaggtaagtccgactttggtaaggtaatgaaagctttaatgccaaagattaagggacgtgccgatggcaaggctgcttcgcaatcagttcgtgatcagctaaattagtagtaacaagaaggagcgggtctatttggctcaaacaacttttacacctcaaagaccagaaaatattcaaaaactagttggagttaatgacggaaatttaaagcttctttctgaaggttatgatatttctgtgtcagatgtcggtaatgagattgtcattgcaggagacgatgaagagaagatcaagaaggtagttgctgttctaaaggcactcgatagtgttgtgaatactggtgttaacatcggtgcgcccgacacagtaagtgcgatgaagatggctgacaagggtaccacagagtactttgcagacctatataaaaaggttttgattagggatgctaaaggtagacctatcagagtcaagaatatgggacaaaagcgttatgtcgaagctattgataaatctgatgttgtctttggaataggaccagctggaacggggaaaacattcttagccgtagtttgtgcaattgccgcctttaagaagggagaagtttctcgaatcattttgactaggccagctgttgaagctggtgaatcacttggatttttacctggtgacttgaaagaaaaagtggatccatatttgagaccaatttatgactccttgtatgctattcttgggactaatacgactgaccgtttgatggaacgaggcgtaattgaagttgctccacttgcttatatgcgtggacgaactttagatgacgcttttgtaattcttgatgaagcccagaacactacagatgcccagatgaagatgtttttaactagacttggatttaattctaagatggtcgtaaacggtgatatgacacaggtcgatttacctggtcgacagcatagcgggttaattgatgctagacatatcttgaagaatatcgaccaaattaaatttatcaacttttctgctaatgatgttgttcgtcaccctgtagttgcgaaaattattactgcttatgaaaaagaggacattaaacactaaaaatggatccaattgatattacttataatgatgaagttggctttttagatgatgaaaagcgtaactggcaagactggattatgaaacttttgctgctagctaagaaggaaattggcaaagataacaacttagagatgagtattaactttgttgacgaagatcgtagtcatgaaattaatttaaagtatcgtgacaaagaccgtcctactgatgtaatttcctttgcaattgaagatggtgaggattcaattgatcttgcagcatttgcagatgatccagactttcaagaggatatcggtgatctatttatgtgtcctagtgtgattaagcgtcacagtaaagagtatggtacaggttttgatcgagaatttggatatacaatagtccatggctttttacatttaaacggctacgaccacattaagccggatgaggccaaagaaatgtttggtattcaaggaaaagtgttagaagattatggtttgccattgtatcctgatcaattagatgaaggcagaggtaaataatggaagaaaaagagtttaagtctggctttgttgctttagttggtcgtcccaatgttggaaaatcaactttaatgaactatttagttggtcaaaaagttgccattacgtctaataaaccacaaacgactcgtaatcgcatttcgggtatttatacttcagatgaaatgcaagttgtttttgtagatacgccaggtatttttaagcctcattcaaaacttgacgactatatggataaggctagtgtatctagtttgaatgacgttgatttagttttattcatggttgaacctgaggaaatgggtaagggcgatcaatacattgccaacttgttaaaagaagtaaaagttcctgttcttttagtaattaataaagttgatgaaattcatcctaataagcttttgccaattatggattcatatcacaaacttgagggctttaaagaaatactaccgatttctgctactcaaggaattgggattgaagatctgcttaaaacgattaaggaatatttgccagtaggcccacaatattatggtgctgatcagatcacagatcggcctgaatattttgtggtagccgagttaattcgtgaacaaattctgcgactgacttcacaagaagtaccacatgctactgctgtcgcagttgatcatatgaatactcatcaaaatggcaagctcttgattgaagcgactatctatgttgagaaagacggtcaaaaaggcattattattggtaagggcggtaagatgctcaagcagattgggattaattcacgtcaagagattgaaagattgcttggtgaaaaggtcaacttgcgtctctgggttaaggtccaacataactggcgttctgaccctaactttttaaagcgaataggctatgacaaaaaagaactttagttgaattactgttgtataagcgttgtcgaaagatgacgtcttttttgtatgtttagggagacaagaaaattctattcgttggataactaatgggataaaaatagatacaatagtaatgacaaagtgatgaaattttgggatctattgttttgtgattgttgttatattgggatttgtttactgtattctccacgtatgtggaggctgaaacccagtttcgaagttgattctgggtaaagtcttggtattctccacgtatgtggaggctgaaacagcagtctttttgtactatagactatttatgatattatgatatcttcatcagaatatctataaaaaatgaattttaaatactaaaggagtcatgatatggcacgtgaactaaaagaagttcagggtattatctttaaaaggcagaaatataaagaagcagatttattagccaaaattatgactaaacaagatgggattatgactctgattgttaaaggagccctgaggcctaaatcaagattaagtgcagcaacattaaatttttctattggtacttacgtaatttatacgagcgaaaagggcttaagtaatttacgcacatataaaggggcaaggcagtttgatggcttatataatgatttaaccaagaacgcttatatttcttttatttttgatttaattgatcacgcctttgtagaatatcagccaattggtaaatattatgatttagctttatttgctttgaaaaaaatagatagtggcgttgatgcagaaatgattacacaaattgtgcagatgaaaatattagcagcatatggtgttgagccacagctaaagcattgtgttatttgtggtaaggaaaaaggcgtttttgattattcgattaaaatgggtggagttatttgtagcgatcattttagtacagttactagccgaatgcatttaaagccaaaagaaactgctgtaattagaacaattggcttattaccgattgagcgattaggcgatattaaaattaatgaagaaacgaagagggctactagaaaagcgattgatcgtatttaccatgaaacgataggcctaaatttaaagactaagaaatttttagatgaattaaaactttttagttagtaaaaatctggttttaccatgacccatgtgttaaaataaaaacgtatttgacgatgatgaggatttaagaaaagtactagttcagcgaatgtcggtcggtgtgaggacatctaggaaaaggcacctctagtcatattgttcaattaagagcaggaaggatacttcctgaattagggtggaaccgcgataatatttcgtccctatgcaaaattttgcataggctttttttatggcctagcgcaggaggagattaaaggaaatggcagataagaaattaaatattcagaatatgatctttaagctggaacaattctggtcctccaaaggttgtatgattatgccttcatacgatgttgaaaagggtgcgggtacaatgagtccttacacttttcttcgtgcagttggtccagaaccatgggcagcttgttatgtagagccttctagaagacctgcagatggtcgttatggtgaaaaccctaatcggttattccaacaccaccaattccaagttgttattaagccagctcctaaggatattcaacaatattacctagacagtttgaaagttttaggtatcgatcctttggaacacgatattcgtttcgttgaagataactgggctaacccatctatgggttgtgctggtgttggttgggaagtatggcttgacggtatggaagttagccaattcacatacttccaagttgttggtgaattagatgttaagccaactatgagtgaaatcacttacggtgttgaacgccttgcgtcatatattcaggatgttaactcagtatttgatcttgaatggggtaatggcattctttatcgtgatatcttcaagcaaccagaatatgaacattctaaatatgcatttgaagaatcaaatcaagaacaattgcttcaattctttgatatttatgaagcaactgctaagcgtttattggataagaacttggttcacccagcatatgattacattttgaagtgttcacatacttttaacttgcttgatgctcgtggtgctgtttcagttactgaacgtgctggttatttatcaagaattagaaatcttgcgcatgaagttgctgtcaaatttgtcgaagaacgtgaaaaacgtggcttcccattgcttaaaagtgcagaagacaaaaaggcgggggtagaaaatggctaaagattatttatttgaaattggtactgaagaaatgccagctcacgttgtaccacgcagcgttaagcaattagctgacagaacaagaaaatttttaaaagaaaatggcttgaaatttaaagatattaagactttttcaactccacgtcgtttgactattttggttgaagatttggctgaaaagcaagacgatattgatgaagttaaaaaaggtccagctaagaagattgctcaagatcaagatggtaattggactaaggctgctcaaggatttgctcgtggccaaggaatgactacagacgatatctattttgaagaacttaagggtactgaatacgcttatgttcacgttcaaaaggaaggtaagaaagctagtgatatcttacttggtatgagcgatatcattaaggcgatgactttccctactaagatgcgttgggattcaaatgattttgagtttgttcgtccaattcactggcttgtttcattatttggcagtgatgtaattcccgttaagattttggatattactgcaggtcgtaaaactcaaggccatcgtttcttaggcgattcagttgttttggccaatgctgatgactatgaagatgcattaaaagatcaatttgtaattgctgatgcagatgaacgtaaagatatgatcgttcgtcaaatgaatgaattagttaagaagaacaactggcaagttaaaccagatcgtgatttactagaagaagttacttatttagtagaatatccgactgtatttgctggttcatttgatgaaaagtatttgaagattcctgatgaagtgctgattacttcaatgaaagacaatcaaagatactttgaagtctatgatgaaactggtaagttaattaatcactttattgctgttcgtaacggaaataaagattaccttgataatgttatttcaggtaatgaaaaagttttagttgctcgtttggacgatgctcaattcttctatgatgaagaccgcaagtatccacttagtcattttgttgatcgtcttaagaatgtttcattccacgataagattggttcaatggctgaaaagatgcaacgtgttcgcatgattggtgattacttagctaagcgttgggatttaccagagaatgtagtcaaggatttcgaccgtgctagtgaactttacaagtttgacttagttacccaaatggttggtgagtttgcagaacttcaaggtgtaatgggcatgcattatgctcgtcttgcaggtgaggacgaagaagtttcagttgcaatcaaggaacactacatgcctgccactgctgaaggtccacttcctgaaactacggttggttcattattatcaattgctgataaaattgatacaattgtaaccttctttggtgcaggaatgattcctacatcatctaatgacccatacgcacttcgtcgttatgcatatggtattgtaagaatcttacttaatgagaagtggtcattaccatttaacgaagttttaccagaaatcattagtatgcttaatggtgtaactccagctaagctacctaagagtgatgctgaccaggaaattgcagacttcattcgtgatcgtgtcaagcaatacttacaaaagaatgacttcaagtatgatattattgatgctgttcttgcttcaagtcaacaagatccaagtcaaattttagcagcagctactgtattgcaacttcaccatgatgatgaagaattcaagccagtagttgagagtttgactagaattgataacatcttaaagaaggctaaatttaagagtaatactgctgttgatgaaagtctctttgatgataacagtgaaaaagaactttacgctggcgttcaaaacttgcaagatattgaaagtttggctgatctctaccaaggttttgttcaactgcaaccagtgattgatcaatactttgaaactaatatgatcatggctaaggacgaaaaggtcaagaataaccgattagcacaattatatgcagttaatgaattagcagatcgtttaggtgacttaagcaagttagttattaagtagttaatttagatagaaaaagggtgattcatatggctggacggattcctgaagattttatttcagaggttcgcagtaacgtcaatattgttgatgttatcagtcagtacgtttcgcttgagaaaaaaggcaaagactatattggtctttgcccttttcatcaagaaaaaactccgtcgtttactgtaaatgctgataagcagttttttaagtgctttggttgtggtaagggtggaaatgtttttaaattcttgatgtataaggatgatttaacttttcccgaaagcgtcgagcgagtagctgagtttgcccatattgctatgcctaatggatatggtcataatagtggcaccaaattaaatccacttatgcaaatgcatcaggatgccgttgatttttatcatcgtgtgcttttgactactaaagccggtgaacgggggatgcagtatgctcaaaagcgagaactagatcaagaaatattagaccattttaagataggctatgcacctaaggctgataatgttttgattacttatttacgtagtaaaggttatcaagatgatgatctagcacaaagtggtttatttgttcaagctagggatgggcagttatacgaccgttttcgtgaccgtttgatgtttccattggataatgaaaatgggagaacgataggcttttctggtagacgaatttctgatgataagaccgaagctaagtatatgaatagtcctgaaacggggatttttaccaagtcaaaggtattattccactttgcagaagcaaagaaagcagctcgtggtgaaggtcacttagttctatatgaaggttatatggatgtaattgcagcatataaagcaggggtgaaatcgggaattgcctcaatgggaactagtttaacagatgaccaaatatatttgttgagacgtattactcctaatatcattattaattatgatggagatgatccaggagtccatgccgaagaacgtgctgcacgtatgtttaataaagatggcaattttaatttaggaattgtagttttaccagaaaaactagatcctgatgaatacgtcaaaaaatatggcgctgagaagtatctggaagaagtcaaaggtgccttaacgccgactgactttttcttaaaacggttggaacaaaaatataacttagataatgaccgtgaaaagattgcttatttaggtgaggccgtaaaagaaattgcacaagtgcgcaatccagttgagcaagatatgtatactgaaaaattggcgaagtctagtggggtttctattgcttcgttaaaggcaaatcttgctaaagaaagacggcgaaataatcgggcacgcaatcatgtacgtaattctcaaagaaattcacctgattatccgatagacgtacctttacctggtgatgaagacgtgcctacagagcagtcagtagttgaaaaaaatcctagtcagaccagactcttgtatttatttattcattcaactgatgctcaaaaatatatgttagaagggcaatttcattttcctaatcaggattttgaaactctggcacaggattggttaaaatatgcggaaactcatgaaaatccacaaattgatgggttcttagattttattcctgagcaacttcaaggtataatagtagatgctgaaatggcacagatgccaaaagattctacaattcaagaagttgatgctttggttctagcattaaaaagacgcaacatctattccaggctgaatgagctgcaagctcaattacaggatgctaagcgcaaaaatgatgcacaaggaattattgcaatcactcaggagattattggattaaaacggatcttaggttaataaggaggctttttagtggcagaaaaagaaactacacaaaaactatctttggataagatggttaagcaagtcgtaaaagacgtaaagaaagataagtcgatcactgaagaagatttcactgctcgtttgattaagccttataacttacaaggcaaggctgtagatcaactagtacaagagtttgaagataatggtattagcattgttgatgaaaacggtgatccttcaaagttagccttaaagaaacaaaaggatgttgaaaaggctgaattaaaggatatgtctgctccatcaagcgtacgcatgaacgatccagtgcggatgtatttgaaggaaattggtcgtgtaccacttcttactgctgatcaagaaattgctcttgccaaaagaattgaatccggggatgaagaggcaaagcaagaattagccgaagccaaccttcgtttggtagtttctattgctaagcgttatgtaggacgtggtatgtcattccttgatttgattcaagaaggtaatatgggactaatgaaagctgttgataagtttgattatcgtctaggctttaagttctcaacctacgcaacttggtggattagacaggcaattactcgtgcgatcgctgaccaagcacgtacaattagaattcctgttcacatggtcgaaacaattaataaattgatcaggatacaacgtcaattgttacaggacttaggccgtgaacctacaccagaagaaattggtgcagaaatgaatatgccaaccaataaagtacgtgatattctaaaaattgctcaagaacctgtttcattagaaacacctattggcgaagaggatgattcacacttaggcgactttattgaggataaggatgcaactagtccagaacaacacgcttcttacgaaatgttgaaggaacaacttgaacaagtacttgagactttaactgatcgtgaggaaaatgttttgcgtttgcgttttggtcttgatgatggtcgtacccgtactttggaagaagtaggcaaggtatttggtgttaccagagaacgtattcgtcagattgaagctaaggcattacgtaagttgcgtcatccaagtcgctcaaatcaattacgtgatttcatggattaattataattatctatattaaaagagctaagtttgatacaatcccactaaagtggacgattgaaatacataaagtattcaattatccatggaggtgggattttttatgtccagaaaaagtaaatattcattcgatcaaaagatatgggcagttgaacaatacttgaatggtaataggagcagcgttgaaatagctaaacggcttaagatgccaagtaaaagtggagcgatgcaagtaagaagatgggttcatcaatatcaaagcaatcgtgatacccttctaagtaatgctcaatacaataatcattactctaaggcatttaaagaaaaggttgttcaagaatatttagctggcaaaatgtcgttaccttctttagctaataaatatggcattagaagcaatggaacagtatcagaatgggtttccaagtataatagtcatatagaaaatcgggactatgatccccatccggaggtctatatgactaaagcaagaagaaaaactacccagcaagaaagaattcagattgttcaatactgtcttaatcacgacaagaattacactcaaacagctgtcaaatttgattgttcttaccagcaggtttacagctggacacacaaatatctagctaatggtgaaacaggattaacagataaacgaggcagacataagaagccagaagagctaactgagttagaactggctaatcgaaaaattaaggaattagagcgtcagctcaaagaagaacaaactaagaacgaattcctaaaaaaattagatcagttagaaaggatgtgcttgccggacaaccaagatacagacaagccgcaataaaaagacgctggaaacaagaaacatatcagttaatccatgactgccatcaaaagtacaattggaagattgatttaatgtgcaaatgggctaaaatagcacgctcagcttattacaaatactttgatcctaagcgcaagccgagtaagcgtgaagaacgagacaaaaagattgaagcaaagatcattgaaataaccaagtctaacaacagtctgtttgggacggaaaagatgaccatggcagttaatcgacagatgtctgatgaaaagccggtttatcataaaactgtttaccgcttgatgtgtatcaatggcattagatcacaaaagcctagataccagaagctaaagttcaagcatacaacgcctgagaaaacggccgaaaacaagttaaaaagagactttaatgcatctagacctaatgaaaaatggtgtacagatatcactgaagtcgttgctgctaacctgcctaaggcatatctatgtactgtgtttgatctatatgatcgctatcctgttggctacgcaattagtaaacgaaacgatactgctttagttcaagcagcctataagcaggctgttaaagcataccctaatgctcatccgcttttccatagtgatcgtggttttcaatttactcgcgcacctttccaaaaccaattaaaagaccaaggcatgacgcaatcaatgtctcgtgttggctgctgtattgataatggtccaatggaaggctggcaaggcattatcaaagaaatgcgagttattcttcatcctcaagtggccagttatgatgaacttaatgattctatttgtaagacaatagattactacattaatgaagatccacagaaacgttttaacggtttaactgctggtgaaatgcgcaaagaagcgatgaaaggcaatattaagaattgccctattgcaccaaatcatcgaattgagaaatactggcaaaaaatacacgaaaagaaaataagagaagccaaaaaatcctcagctgattattaatcaactgaggaataaaagctttatgtaattctactgtctacttgacagggaatgtatcagttttacttagctcttttttattggactggatctttacctgctgcccttagattatcttcaatgattttcattggatttaaccaagtgccattatctttccaatagtatttgcatggcgtattgtcatgctttttatcaatgtaatctttatctgtcttagtaactcctaaatgaatgtgagagccggtcagtttaccaattttttgtcccaacttgactttttgaccttttttaacataaatatcagtaatactgaggaagccttcctggtaaacttcaacatagccatcatcggaaataatccaaatataaagtcctaaacctggggcgtatttaacacgatggacagttcctgcatgcacagcatatacggaagaatgtccaacttcactaaatccgaagtcatagccatcatgaaaataactcttgctaggatagactcgacgaatgacgtcagtttcaccaaacttttgtccagatttaaatttgattttcttttcatagagcttcttaaaagggtaaccccaagtaagatgaacgacttttttctttttagcagtcttctttttcttaaccgtgtgagtttgtggtcgtaaactattcagattgttttgccataagggaatagaggcaaaagctaaaatagcaattaaagcagctaaaagtgcaaacttactttcagtttttttcattaaaatagctcatctcgctttccgtcaagcatatgttcactaattgtttgttcaaaaaatactggtaaatcatgatcaaaattgtaagctaacttttgctttttcaattctttagcactcatccaggttagtttaccttcgtctgattctttaacggtacccgaaaattgttcagctatgtagaaaaatactaaataacgttcatcattgtgatcataaaattgtttaacaccaactaattgaggatgactaatcgttaatccagtttcttctttgacttccctgacgacagaatcatgaaaagattcatgcgcttcaacatgaccaccaggaaaagtaagtcctggccagaccggatcgttgcgatcaagaactaaaacctgatctttgtttttaaccatgcacatattagttaatgtgacattttctgttctactcatgtaaaaaacccgctttctgtgacgattatatcaaatagtagcaaaataagactatgaaatatgctaaaatttggttaaccatatcttttatggaggaaacatgaatttaagattaaatacgttggcaaagatggtagatcctggcagtcgagtggctgatattggaactgatcatgcatacttgccaattgaattagtaaaaaatggcaaaattgattatgcaattgctagtgacgttgcagagggccctcttgaaaatgctaaaaatgatattgcagcagctgggttaaccgagcaaattgaaactcgcttaggtagtgggttagaaaccgttactcatgctgatcagattgatacagttgtgattgccggaatgggcggcaagttaatgactgatattcttgatagagcttggagcaaagatgcacaatttaaaactctggtactagaacctaatataggcgaagcaggggtacgtaattggctgatgatgcataattataagattatctcagaaaaattaattgcagaggctgggcatacttatgaattaattaaggctagcttaactgaagaaaagcatgagatgactgaaaaggaaatcttttttggcccctttattgtacaagaaaagaatccagttttttatcagaaatgggaaggccaactcgcttattatcaaagattcctggttaatttgaataaagcaagaaaaaaagacgaagatcgaatcaatgaagtagatcatgatattaaattaatcaaggaggaattggagaaatgaccaaagtaaaagacattgttgcgcgtttgcgacaagattttccggaaaacattgcttcacaaggtgatcctgttggtatgcaaattggatcaatggaggctgatgttaccaaagtaatgactactttagatgtacgtccccaggtagttgaagaagctgttgaaaaaggggttgatttcatcgttagtcaccatcctgtaatgtttagaccagcacaaaatttggattttgcgaatgcacaaaacgcaatgtatggcaatattatcaagaatggaattactgtttattcaattcatactaattcagataaagcccaagatggatctgctgattggcaagcagaggaactaggtctgcaagatgttgaaccattttgtctggatgatgatggaattgctatgggtagaaaaggaaagttacctagaacaatgactgcttatgattttgcctattatgttaaagaaaaaatgcaaattaaaatggcacgtctgattactgcaaacaatgaaaagccaattaccagtgtaggatttatttgtggggatggtggtaaatattggactagagccttagatgaccatttagatgcttttattactggggatgtttattatcatgtaggccatgatatgatttcatctggtttaactgttgttgatcctggtcattatactgaaaaactatttaagtacaaggtctatggtcgacttaaaaagtggaatgaagaaaataactggaatgttggaattgagctttccgaggtttctactaatccatttcaagacttattttaattagaaagagagttatatatggaatatcctaatttgttacctagatttttaaagtacgttaaagttaattcgcgttctgacgaacattcagatcgctttccatcaactgaaagagaagaaaacttccaaaagaatgttattatgaaagatttggaagaattaggtttaagtgacattcactacaatcaaaatgctggtagtgtaatcgctgaaattccgtcaaatgttgattatgatgttccagtaatgggctttttagctcatagtgatacggcagactttaattcagaaaatgttaaaccacagattcatgaaaattatgatggcgaaagcaaaattcaattaggagattcagagttttatcttgatcctaaagtttttccacatttgaagaattataaaggacaaacaattattacggcctcaggtgataccttacttggtggggatgacaagtgtggtgtgtcagaattaatgacttttgcggaatatttaatgaatcatccagaaattaagcatggtaagattcgattggcctttactcccgatgaagaaattggtactggtgctgaacactttgatgttgaagactttggtgctgactttgcttttactgttgatggtgaagctcctggtaagttagattggggtacattctctgcggcacaatttagtcttgatattcagggagttaatgttcacccagctgttgctaaggggcaaatgattaatgcaattcaagttggaattgactttcataatcaactgccagaacacgatcgcccagaacataccgatggacgcgaaggtttcttccatctaatgaattttgctggtactgttgataatgctcacttagattacattattcgtgattttgaacgtgatgggcttgaagagcggaagaatttggttaagtcaatcgttaagaaaatgaatgatgaattcggtactgaacgaattacacttaaaatgtgggaccaatattacaacatggccgatgaattaaagaaacatatggacatcgttgacttagcgcgcgatgcttataaagcagaaggtcttgaagtcaatgaagacccggttcgtggtggtacagatggctcacaattgacttatatgggcttaccatgtcctaatatttttgccggagaagaaaacatgcatggtcgttatgaatacacagttcttgagtctatgtggaaagctgttgacgtgatgatcaaaatggctgaattaaatgctgaaagagctaagtaagtgaaacatttttgactaaaaatatcaataattctatttctgatctaatatgagattattgatagattaggaaatagggtaaacatagttaataaataaaaattatgcactaatactattaaaaataaaagatagtttataattaccgtcattataggattatagactatctttttgttgtacttttaacttttatgaacttgtgaaacaaagtgattaaacttagcccttgcaaaaagtgactaaagtaagtattatagttagtgtaatagattaataatacagtacaaaataggagctgagtaaatggaatttaaagataatattcctatttatcttcagattgaacaatacttgtatcgtcaaattgctttaggcaagttaacagctggtgagaagattccttctgttagaaaacttgctctagaattaaccgttaatgttaataccgtgcaaagagcactacaacagatgaacagtcaaggtattctttatactaaacgtggcgaaggtaattttgttactgaagatactaaactattatccgaaaccaagcagtcattaattaataatgaattagaacagtttgttcaaaatatggaagagtttggaataggaaagaacgagttagtttcaacgttagagaattatttaaaaaatggtggggatcagaatgaatgatttattagctattaaagatgtaagttataagaaaaatcagaagcaagtattgcaagatgtgaacttgaatttagctcctggcaagattgttgcgttacttggtgaaaatggtgctggtaagaccactttgatgcgaattattgccggtgtagctaagaattacaaaggcgaaattaatttagagggggcaacaaaagagacagaaagaaaggctaagttgtcttttactgatggtttaactggcttcagcgattcaacaaagatcaaggaagtggttaaattttacgcaacgatttttcaagattttgatgagaatgaattcgatgagctgcgtaagtttatgaaattagatcctgaaatgaagttgagtcagttatcacgaggaatgcgtgaaaaattgattattgctttaacatttgctcgtaaagcagatttgtatttacttgatgaaccttttggtgggattgatgcaatggctcgaaagaaaattattaattccatcattttgtggaaagatgaaaaggcaacgattttaatctcagatcactttgtcaatgaaatttcatcattgcttgatgaagtggttattgtaaaagatcataccgttttggaacacaagtcagcagatgacattcgtcaaacgcataagtcaatcgaagaatactatgaaagtttttatgcagatgaggatgatgaataatgactagttttaacacattgtttaatcgaatgtttcaagaaaaaagcaagtcagtctatttaatcttcttaattcaagcctttgctagtttatgttttacaattattggttttgtttcggaaaatggtacaccagaatttgttaatggaaaagatactagttctgtcaatgtgattgttgcttttctcgctgtatttgcagtaatgatgctgataacgtcatttatcgctgattttgtttattggattatttcttcaatcaagaatgaaaaaattaatcgcagtcaaacttggcgcttgattccggtaactgatactaagtttttgcttagcaattttgggacagcatttttaacttatatttggttaggaattttagaagcggtcacgataatcgttacccttttgccgatgttgtctgatcaagatgtgcgcaaagcaataggtcaggctagcatccatctttcagcaagagactggcaaacaatgctcggaagtttgctgctaatcatttttattggctatgcttggtacgcaattgtaagtttgcttaacctagcaagccgcagcattattgattttttgccaggtggctcaagtaaagtatggacctttattattagagtaattgtaattattgcgattatttggattttaggccatgcggcaacaattatcttttcagtcttaggaaagtttagtccttttatggtcaacagccaggatattaactatgccactacgattcttcaattcttggtctttgatgttgtgattactttgatcgatatcttgcttttgaataaattcgtagaagcaaaacagaattaggagttttttatggcaaattttaagaccttgtttaagcaaatgtttgtgcaaaaaaggcgctacgctaacttagttttgttattacaagtttttgcagtcctttttttgctggtaatggctctgttagataaaagcaatttagcttatctcaacattagtaaggacagtaattggctagatcgtttgcttagtgcaggaatgctcgaaacgccgattgccgatgtgatttttgttggtctgctttgctggcaaaatgaaaaaatcaacctcagtcaaacttggcagctagctccagcttcaagtgtcaaaatctggctgattaatatgctttctagtttagttgaatgtatttatatttttgtaattcaagtcattttaggcttcgttgctgctatgattgataatttaagtcatcattattcactgcttcatgacttagttgatgctaaagttacttgggcagatgctagtttattaattgaatttctattgttcttaactggaacggttttagttattatgacttttgtcagttttgctaattttttgacgaaagtaattgttgatcaattgccagttaacaataatattgtcattaagttatttgtgatggcagtgattgtgattattgcaatcttgattgctgaacagctaaacgaacaaattactgctatgtatttgcatcgttttgccaaagaagcagcatatgatccattgggtatttcagtggttgagtactttgcaggagcaattgttttaggagcaatcgacagctacttaatgagtaaatttgtcgaacctaagataattaatcgttaattgaaggggaggggtagatagtgacgaatttttggaccttgtttaggcaaatgtggacgcaaaaaagaaaatttatttatttggttttcttaattaatatctttgctgtagtatttttatcaggttattttcttcttttcaaaaattggaatggtctagcaaatctgccgtctaaaaatttagggcaattctggcgcaataattttgtctatgtgactttatacattgattttgccttttgtgcgattacatgttggcaaaatgaaaaaattaatctgagtcaaacctggcatttagcagctagcgatgaacgaaaaacatacttagctaatatatttagcagtttgctggcatgtggttatttcttcttgctgcaagaaatcgttaatagtctgttgctgatccctagttgcggggcagacagttttgctcaagcatttcgtgagtttggtctgtatccaattaaaacagttcccggcgttgaaataactagcaatcgaatgcttgcttttcattggttgtttatcattttgataattttaatcatttacttctttgtcagctttgccaattttagttcgcgagtaattactgatttcttgccgtttaagagtacagtttgggctcgcttgttaattatcgcaattttggtaattgtcgcagcttactgcggcatgatctttatgtctaagttacagggctttgttgataagagtccaaatttacaagcaaccgatccaatctggttagatgatttatgcttgtttattgttagccttgttttcggtattttgaatctagtattcgtgaagaaatatcttgaaccaaaaatagattaattaatgcaaaaaaagagcttcatttcaatcaagaaatgaagctcttttttgtagttaactaagcatttgctgacatgtaatcataaagctgatttacttcttcggctgtgaattgtccatcgccaactttcatggcgtgaactttttcaactgagaggtgactagcaaaggctaggtcagtgtcattaacatggtgttttacttgaaaattgataattgcatcagataattcttcttgctcattcataataatttctccttaccctctaattttaatcaaattggaataaaaaataaaattttttgcaatttcattgattaaaatgttttccattgcgtaaatggccaatacctgaagacgactcggccaactaatgcgctgcgcttaacaaaaccgaagtaacgtgaatctttggaaacatcgcggtgatctcccatgacgaagtaactatccttaggtactcgcttttttaaagtgaaattgttagtatagagttcacctaatttatgtgactttctttggtagccattatttaaatatggttctgcaatttgtttgccgttaatgtaaagcttatcatttttagaagtaaccatatcaccaggtgtaccaataattcgcttgatatacagagcacctttttggtctggtgcttttagaatgacgatatcatttcgtttaggcgtaaaatgacgtacagcaatcaaacgatcgccattctcaaatgtgggctgcattgatggaccagatactgtttcatttgataggaaaaaactaaaaataaagtagtaaattcccatcaaaattgcaaacataataattatgtctaaaacaaagcggccaatgctttcatcatcatttctctttttggtttcaaccatagaatatctcctttgcttgctagtcttattataactgaattctccgccgttgaatggtaaaatcatattaaggtgtttaagtatgacaaaatttttgacgaaattaacaaaattagagcaagagataaatcatactgcggttaaacgacaagttgaagaaatagcattaattgatagttatgtacaagcaggtaagccattgaagcgggcaccacgcagattaggtttattgccagatgaatttgaagaagttttagttgaggtgggaccagataaagaaggggccttaagggatttaaataatttacttaataattttcggcaatatctctctttaatatatggcatctggtctctgcctaatattcagactgcgcagttaattaaaaataagctgcatgtacaaacagcgttagaaatcatggcaggcaacgcgtattggtctcaagctttgactcaggttggaattaaagttcacagtacagactcattagagtgggccaagacgtcgaccactggagctaagcctttttatccagtagaagatttaccagctgaccaagcaattaagaagtatcacacagttaatctagttctatgttcgtggtcaccaaatttcggtcacggagatttagaaactgtggcagcttggcataagtataatccaagttgtcatttgctctttgttggtgaaaaagatggtgctactaattcaccagaattttggcaccaaaattggtttaaaaatagtgcagctttagacgagattaatcattccttgcaaagcttcgattttattaatgaacaggtatttgaaataaaaaatgaattttaaaaagatatttttgttactgattcttttattatcttttttaggaattggaacaatgctctccaatattgaatctaattatgctgacgaattgctggaagcacacggcttaactaataatacccgctattttagaacagatagtgatgataagattagtactttcctaaaatatttggacaaaaattatgcgaatcatcaaattcaactgcatctagataataattatgaaaaaaaacaagtgcttgtttgggctaatcatgccgttactggcttgccaactgagagtggtcgctatttttcgcctgatgattttaaaggacaggtttcttttgtggtgctggggccaacagttaaacttaatttattagatgtgcagaataataaatatgttattttaggcaaaaattattattctgttataggcgaatttaaggactatccacaggtagaaatggataaatattatctaagtacaggaattgatcagccaactgctaaagaccagctcaagaattatcgaattgtagtagatgcaacacctgcagtgattgaaaagattgctaagcattatcatgctagtttgcatattccgtcttttgttcaagagcatcatcgagatcgtttatctgtcgtgccggatattttaatgttagttgtttgcctattggtcggaatgatcacaaatatgttgcttgcaataggaattaagcgtcaggctcgtttaacacgtctacacgatgatttgctgcgcaattgggtaattaaccgcagcgtacgtttatttttaatagaggctatttttgcccttgctacatacttctttttaagatggcatgccttttattcaacatatggttctttaatagttacattaatagcttcctgggttgtaattgtattggcgttttgtgggatggtctattacttagtgagaaaggacaggaaaattgctaaatctaccaaatgaatttaaaactaaatatgaaaaattattaggtaccaaaaaagcacaagaactatttgcggcgatgaatgaagagagcaaaaaagcttttagaattaatacattgaagcctactaaggtttcatatgagcttactgattcagtaccgcaaataaattcagcctattatggtgaagtatcgggggaagatcctgagtgggtaagcggtagtgtttattctcaagatccagcggctatgtttcctgcggcaattagtggtgttcggccaggagagcgcgtgctagatctgtgtgctgcgcctggaggaaaaataacagcattaggagaacaattgaagggtgagggccttttagtagctaatgaaatctctgcaacacgagtaaaggcactacgggaaaatattgaacgttggggcatcagtaatgccttaattactaatgaaagtccagaaaagttagttccaattttttcggaattttttgatgtgattttagtcgatgctccatgtagtggtgaaggaatgtttagaaaaaatccggaggcaattgattattggtctcaagactatgttttaacatgccagaaccgtcaaaaagagatcctcaatgaagctgttaagatgcttcaacctggcggacgcttaatttattcaacttgtacctttgcaccagaagaggatgagcagattgttagctggttaaataaagaatatggttttacaattttagatacagggatacaaactaataagattgatgttggacagcctgagtgggctgatgggaatcctgatttgactaaaacattacgcttttggcctcaagatggtataggtgaaggacaatttgtggcagttttacaaaaagtaggtaaagctagaattgaaaaaaagagcaaaaacaaaaaagccaagcgtgatccgtggcgcttaaccaaaaatgatcaggaactagttggtcaggtaatggatcagtttaatttaccagttgctttaagtgactggcgtaataaagcaaaagtccgtaatgaacatgtctatattcctgcaatcagtttgcctgaaaaaagtaagcttcatgtaattaataatggagtcgagttgggtatattaaagaaaaaacgttttgaaccaggacatcaattggcagaagtgctaggtaaggtaaagcaagaacgggtttatgatttaccgacaattgaagaataccaaaattatttgcacggtgaaaccgttaaagtggacagtgatttgcggggctttgtgttagtcagctatcaaaaattaatatttagttttggcaaaatcgctggtaatcaagtattgaagaacttttacccaaagggattgagaaaatgataaaactaattgcgacagatatggacggaacctggttaactgaccagaaagactatgataaagaattatttttgcgtgaatttgcggaaatgcaaaagcaggggattaaatttgtagttgctagtggcaatcaatatgctaacttaatgactcgttttcctgaggttttggataaaatttattttgtagctgaaaatggggcattagttgctcaaggaagacaaattttgcatgttgactcgttaagtgatgacatatatcaaactttattaaaaataactactgaatatccatatccagctgtagtgatggggctagtaagtgcttatgttaaaaagagcagtggacgagcttataaacaagaaatgaaaaaatacatggagcatattactgtagtagattcttttggagaaattgatgatcagattttcaaggtcagtctgacagtgccagaagataaaatgtctaaaattttgcgcgaattaaaagaaaaatatccggaggttggttttgtttctggtgcagcagactcgattgatatgcaaactaagggaatgaataaggcagtaggtctagcatatttgagtcaaaaattagggatcaaatcaagtgagatgatagcttttggcgatagcggtaatgatgtaggaatgctgaaatatgtaggccgtagttttgctactgcaacggcgttgccagaagccaaacaagctgcagggcaaattattggttcaagtaatgaaagtgctgttcaaaaagaaattgctaaattgcttgaaattaaataaggaaaattatgtaaagtaaaagcactagtaatcattaactagtgcttttactttacagtaactgatcgatttgagcctttaatggtaaattatagtatttttttatttgtaccagggatgctaaatcttttttgccgtaaacagcaattaaagcagccaattcatttttccaattagtaattaattgctctaatccagtactaccattttggatgtattcttgtaaaaaaacatttgaaataccaacaaattttcctcctagagctaaaccttttaaaatatctaggggattacgtactccaccagaaacataaaatttaacttgctcttgccatgccatcagagcagtcaccacagtaggtaaacctaaatcttctaagtatgaaacgtcactggcattacgtgcattctcaatctgggcaaagtttgtgccacccgaaccggcgacatcgaagtattcaatgccatttacttttaaaagatgaatacttgtttgatccaatccaaaaccgacttctttaataataatgggcaaatcgatagcggtacgaattgctttaattgaatcaagccaacgaaagtcacgatcaccttcaggcatggcaatttcttgtattgtatttaaatggatctgaagcgcatctgcatttaattcttggataatttgtttaattgcagagattggtgtttctggattaacattaacaattagtacaccatctggatcttctgctctggcaaccataaaactgtctagttgatcagtttccttagctaaaatgctggcagatcccaaagctagggcaatattttgctgctgggcaacctgtcccaatgcttgattaatttgtttagaagcagctgagccaccagtcatagcattgataaaaaaaggcgcagaaacatttttgccaaacatttctgatcccagaatagttggatcgacttttgtttcaggcagagcagggcgcaacaaatgcagttgatcaaaactattatatttttctttattaaaaaacatctgagctaacttcagatgttcttcttttctttcagatctaatcgacatagaactctccatcaatgagccatgataatctggtgaaccttaaaattaagaggcataattccattatggcgccattcgctttcaagtgcttcaacatcggtattagcatctgtaatcacaatgccacagtcaccattaccagcaccagaagttttagcagctccaccaaaattttctgcaattttgattaattgcgataaacgtggaatttcaatggcaatttggttaattttggcaaagtgctgcaacaatttacggttagcccgaatttgttgtttgattaaagcaatattgtttgcttcgaaaccttgaaccatctttaaaacacaagctctagaagctgctaagaaatttttatattccatattcaaagccgccttattagcgttagtttcatcaacgaggcgtgaagttgatgctggcttttgactccaaccaatcatcagtttcatatctttaggaggagttagtaattcaacttttaagccaggccaagcttcattaacgacttgaactaaagtcttattagctaattcttgctttaaccattttttgtcaaaagtttggtaagctaaccagccgccatagacactagctgcaatgtcaccagctgagccatttccttgaactgaatagtgtgaaatagccgataatttataaaccagttcattgctcatttttacgccataaaaacgcaagatagctttaactgtagctactgtgacggctgcacttgaacctaaaccatattttttaccatctgcagaatctaagtctgaattgacgtgtaaatcatagactttcatcttgatattttgctcaatacaatattgttcagtaaatgaaatagctgacaaaatatattcaaaagggttgtcacgattatcgattaccatttttgagccctgacgaacccaatgaatcgaatcctgtgagtattgcttggagtgaattaagccagttgcccctttactcttagtgattgacacacgtacaaattggttaactgctactaaaatagcaggacaatcttgctctaatactgcatattctccggcaatatataactttccgggcgctttttctgttatcaaaagaactaaatcctcgaatctaattaacttttttaattacaactagtccaaataagtaattccaggaccaaaacttgcattcactatattaacattattaaattcggacgaaaagcgttgaatgatatctttgctatttcttaattggcaaagtaccttaatatttggtcctgcatcaattgtatagtaacattcaattccttcagtacgaagttgttcaactaatttaatagcttgaatggtttgcggctcaaagtaagtgaattcaggctgtgcagttaaattaattgcatgcatttcatttgcatttaactcagctaactggcctagggcagtgaaatcattactttttatagctttgatcatttcatttaattctgaattgttgcgttcaagccagggcctgaaaaatggagaagattgggcatctttcataccataagtcgaagaaatctttttttgtttggtatttaattcaactgctaaaaggtgaagatccatcgttggtgtttcatctagtgcatatgcgtaagatgtttcgtcgctattacctttttgccaaacagcaaaaccgccataaacggagcggctggcagaaccagatccaatcctggctaaacgagataaatcttctagatcaatgttgatgtcatagcattgacaaaaagcagcagctagtgccgcaaaagcagaactagatgatgctaatcctgcagaagtagggacgtgattgacagatttaacgattaaattgccagtgacgtgaaaacgagcctgcaatttttttagataagcaaaaacacgttgactagctgcagcagtttgctgttgattatttaagaaaaattgattttcaccatctgttttttcaacgctagtatcagtataaaaagcatctaaagtcattgataaactagacattaaaggaagacgtaatttgtcgtcagctttgccccagtacttgattaaagcaatgtttgtatgtgctcgtgcggttctattcattaaatctcctcaatccagtagtcactaattaaatctttacatttagaggcaatttcttgggcgacagtttcgttatcgcacaaggaaatagtaatgccgccaagacctccgcctgataatttaaagcctaaagcgttatttgacaaggcaattttttgcagttggtcaattttatttgttgaaagatcaaatgagtgcaaaatttcttgtgcttcattaaaaatctgtccaactgcttgacgatcgtgcttgatccaagcttttttagtaagatccgctaattcacccaagcgagctatttttttcttggcatagtcggacttttcaagcatttttttaactaaaaaaacagcttcctttgtattgcctagttgaccagtatccatgattaacagggtagctcctaatttggtttgtaatattttaggccccatttttttattaaaaaaaactagataatctgaattaacagtggctgcatcaagaccagaagctttaccatgattgatcatttcagcatgattagttacagtcataatttctttttcagtcatattcagctgaaagaattggttcattgccctagtggtacctaatgcaacagtagcacttgaaccaaaaccacgttccattggaatttcaccagtgtatgtaattttaagtggatggttattgccagccttttttttcatatgtttaactacgtattttaggccatcatattctgccggtgcttcaaataatggaccgtggtagcgagcggtatccatccacatttgagaagcagattcaacagtagttttaatgtgtaaagccttaattggcatagctaaagcatcatatccataaactactgaatgctccccaataataattaccttgccatgagctaaatagctgcttttcatttttaatcatccttaaactagatttatacaaaagattgcccttgctatgataaaataaaaagcaaggagtgcgaacaaatgatcaaaattcttacaggacgacaaaccgacccattacaagaaaaaattctggaagaagcagttgaaaactatcagcaacacccagaacaagaaacttttatcatcgttcctaatcatattaagtttaccacagaagttagggcaattaacaaattagcaacaagcaaacaacaaactgagactgcagttaaaaatttgcatgttttgtctttttcgcgtttagcttggtttttcttaaaagatgccgagcaaggattgcctaatcaactagatgatgcagctagtgcaatgctcttagctcatattattgagaacaaaaaagatgaattgactatttttgaaaatgttaatgttaattctggattagtaaatcagctttatcagacaattttgcaagtctatgacggaaatttagatttagacgagatatcagaggataatttagatcaagaaactaaaaataaattacatgatttgcggattatctatgatgcctttattaaagaaattgcgggtaaattctctactaagaatgaggttcagctgcaactaaatgaaattttagctaaaagtaaaaatttaaagcaagccagtttttatttctgtgatttttcacatttttcattacaggaaacactaacgattaaaattttgatgcgtaaagcaaaagatgtaatccttgcatttaaaacgcgcttaggtgaaattaattctagtgcggaagaaggagattatgattatgtaatccagcaaactattaagcgcttaacgctgttcttacaagagagaaagatggactacgtgacagcaacttttccgcttaattcgcaatcaaatggtcgtgaaatattaaatagtctttggacggagacaattcctaaagttgacgaattgaagcaggtacaattagttaaagcagactctcgatatgcagaggcttattttgtagcgcggactatttatcaacaggtagcactaagcaactatcgctatcatgattttttgattttagctccaaatttaaaggaatacgagacttatttgacgccaattttacgtcaaaatcagattccattttttaatgatttacaacaggaaatgaagtatcatcctctggttgttttaattgaaagcttatttaacttacatgagaatccgtttcaaacacaaaatatgctagccatcctaaagacacacttgttaataccttcttggtataaggaagaggcggagtatattcatgatgttgatgaactagagaattttgttctggctcatggtattaatcataatttatggaaaaaacactttgataattttgtgaatgctgaagtgatccgcttagacaaaatggatgatgaagtagctaagatcgatcgtttgcgcagctacttggttgataagatttcaacatttttcaaaataatagagcaagaaaaagatagtcaaaaggcgttaacgatattttttgagttcttaactaagaacggaattgccgaccgattagaaaaatggcgtgatgaggccaatgaagccggtgatttacagcaggcgcagcaaccagagcaattatgggatttattaatgcagctgttgcaagactatttagcaattaatcctgaaacttttgatttaaatgaattctttaatatgttaattagcgctttccgagaagcaaatttttcccaaattccttcaacacttgatgcggtaaacctttctgaaatggggatggtacaaactagcggctataagcaagtgtttatcattggcgctactgctaataatttaccccaaattcagaaaatgccaggttttttaactactgaaaacttgaatcagctacaaaatagttttaattcagaatcttacttagaagatagtcaacagcttaataacttagaccaaaattatcagtttggtttgtcgctagctttagcacaagatagggtatatgtatcttatccagtacttaatgcttcaaatgaagagcttgatccttcaatttattatcaacgtttaaaggattatggtgctcagcaatttgttcaacatgatttgccagaaaagatgcaggatcttttgtctttcattactaaccctgatgcaagtttaggctatttaacctatatgaattcaataaattcaggtcttgctgtgcaagagttattaaaaatcacacaggagcaactacctcaaaaaacgaagacagtgcttgaagcaagtgattttgataaccagccagaaaatattggtcaggacttggctagtcaattgtatggtcaaaacttgaattcatctgtgtcacaactggaaactttttatgaaaattcatatgaatatttcttgaattatgggcttaagctgcggcgacggtttgaaaatgaatttgatgttattcaggctggaaactattttcacgagacttttgaccgtttagtgaaaaaactaaacaagcagcataccgacttagcagatttaagcagcatagaactggaacaaatgcttaattcggtgcgaaatgtgatgaaggatgaaggaaaatattctcaattaatgaatgatccttttaatcaatatcttttcaagtgtctagaccatactacttctaaggtagctcataattggcggcgctccttgaaggaaaccccgttacgggctaagtattctgaattaagttttgggttaggtgaaaaaatcaaaggattaagcttaaaagtgccagatatatcaggtcaacataaagttgatttgcgcggtaaaatggaccgggttgatttggccaatttcaatgataaggatcaagttttagcccaggttattgattacaagtcatcagctaaaaaatttgatcttgggatgttttataacggaattgctttacagatggtttcttatttggatgttttgactaaaaatgatcaattttttgctggaaaagatcgtctttcattattgggtgctttttatcaaactgttactagacaattagaacgtttgaatagcaataaactaattgatagtagtttaaatttgaaaaagggagcaactgatagtaagcccaagctgatgtatactggcttaatcagcaatgatccagaaatcttagtagaagctgagccattacttgatgatcatcctagctattcttctgaactgtatactggggttaaaactaaggctagaggtggctttagcttgccacgtgaccgcaactttagtgaggaagaaattgaattactgctagaatacgatgagtatcttattcgacaagcatcaagccaaattttatctggaaaaattgaacttaatccatatcgttatggcaaagcgaagaatgccttaacttattctgattatcgtgatgtcttcttttttgatgcgatgctgcgtcaaaatcaatatcatgaaataaacaatctgaataaaaaagaattaattcttaaaatcaaagagaaattaggaaaggaacaataaaattgtctcaatttactaaagagcaacaacaagcaattgatgatcgtggtcatgatattctggtttctgcttctgcgggtagtggtaagacaactgttcttgttgagcgcgttttaagggagattctttcgggaacccaagttgatgaattattagtaattacatttaccaaagcagcagctgaagaaatgaaaactagaattaaacaggcattatcagctgaattagcaaagccgggatctaatcgcagatatttacgtgagcagctaaatcaagtggatactgctaatatttctacaattgatgcattttgtctagaagtaatccatcgcttttattactctgtaaacttagatccaagttttagtattctaactgatgatactcaagctgcattgttaaaagaacgtgcattacgtgaaattgaaggggagtttctagaaaagaaagacgtaaattttaggcatttttatgataactttgcaggggatagagatgcggatagtccgcgcgacttgttgctggatttgtatgattttgccatggccaaacctgagtatcgctcatggttaaaaaaattggttgatgtttacgtggttaatggcagtatcgtggaatctgatttgtggcaaaaacagattaagccatacttgcttactagtattggcgacttacaagggaaaattaatgattatttagaaaatccagtaatagaaacaaaagagctagctaaggctaaggaagcttttaccttgtttgcacaaaatttagatcattttgtttttgctttagaaaatgatgcagactacgataaacaacgaaaactattacgttcgtgtgtttttacagcgaattatcgtaagtcaagtaaatgggatgaagatgttctaaatttttatgaagacctacaaaagttaaaagatgaagcaaaaaatttggtttttgatacttttacttcattttttgctgttgatgaacaagaacaaattaaagtcatgcagcgcggccaaaagattgttgctgcaattgctaaatccgagctagccttgattgatcggtttaataagctgaagcgcagtgaaaatttgcttgactatagtgatatggaacaattggcttatcagattttgagtcaagatacatcgaattctcaaatggctcgtgaattttatcaaaataaattcaaagagattttgattgatgaatatcaggatattaatgctttgcaagaaaatatcatccagcaaatcaaaaataaagataaaaatacgcttttcatggttggtgatgtaaagcagtcgatctatggctttagacaagcagagccaagcttatttttgaaaaaataccatgattttgccaatgatgataataaacaaaccaaaagaattctgttgtcagataatttccgctctactgagccggttaccaaaattgtaaatcaagtatttaaaagtgtgctaagttcagattttggcgggattgactatcaaaaagaaggacaattaatttttggtgctaagtattatcctgaaaacactcctaaagctagtgaagtaattgttcatgaaaagaaaaatagcagtaatgaagatgaaaatgagatagatttttctgaaattcaaatggttttagcacgtattaagcaactaaaagaagagcgtgtacaaatctttgatagtaaaacaggaatgagagagttacgttacagtgatattgctatcttgactagaagtcgtagtgataatttggaaataatgcaggaatttgctaagcaggatataccattatttgtaactgatgcgaagaattattttcaaacttttgaattgactgttatgatgaactacttaaagatcattgataatcccgatcaggatattccattagtttcagttttacgttcgcctttgtttaattttggtgaaaaggatttagctaaaattcgtatcaagagtaagaactctactttctatagtgcattgacttcttatgtaggtgtaggagatgaattaagtactcgaatcaaagattttttaaatcaactagctgatttgcgcaagtttgccacggcacatcgtatttctgaattgatttggagcatttatgctaggacaaatttattagagataatgaccgcactacctaatggtgaacagcgacgagttaatctagaagctttatatgaacgtgctgcttcat

SEQ ID NO: 18 - DNA, 2634625 bp, Lactobacillus crispatus (residues 1,317,314-2,634,625 of 2,634,625)
  source 1..2634625: mol_type = genomic DNA
atgagagtgcagggttcaagggattataccaatttatcaattttattaatcggatgcggcaaagtcagaaggacttggcacagcctttattaactaaagaagctggtaatgcggtcagattaatgactattcatggttctaagggactagaatttccgatcgtgttttatgtggggatgcagcataaatatcaaatgcgtgatttaaaaggtaactatgtgattagctcagatagtataggaattacgctccgtgaagaacattatcggattgactctttagttaaagcgatgggaaatgtaactaaaaaaaggcaattattagaagaagaagcgcgaattctttatgtagcattaacgcgggctaagcagaaattaattttggttggcgatgttcctaatctggataaacgagttaaagaatggtcgactgaactaaatcagattggtcaattatcattagcagataagttatcttccactagtccattgagttttatgggacctgcgttggctttagatcgacacctagctgtgaaaatgtctgatattactaattcgttggataagagtcagtcgtttttatatattaattatgaaaatgctaacggtgaactacctgattatcagaaagcggagacaagtaatgataaaacgcaaagtaaccttttaaatcaaaccactaaacggctttatcaatttaattatccgtttaaagatgctagtgaaactacagcttaccaagcggtatctgaaataaaaaaagcattcaacgatccgatcgagaccgaattagagaatgcccacttattgacatcgactaatcgttatttacaaccgattgatactaaacctaatttcttgtatcaaactaagtttactggtgcagaaatcggaactgctacacacatgattttgcagtattatgattatcaaggcaatggtgctgaagatcaactagaagtagaaattcaagaattgattaagcaaaagaaactgaatccagaaattgtttctagtttaaagaaagaccaaattgagtggtttgttcatagcaattttgccgaggaattttggcaaaagccagagaatttaaagcgagaaatagatttttctagtttaatctccgctaaaactttgtttaaaaacttttcagatcctaatgccaaaattttggttcatggtacaattgatggctattttgtcaaaaatgatggtattattttgtttgactacaaaactgaccacgttgatcaatcgcatttatctgaatcaattgaattgattaaagaaaaatatacaggtcagcttagactatatgaacaagctatcaatgaatttagtcaaaaaaaagttattggaaaatatttaattctgcttgatgctaaacaagcggttgaagtgaaatagaggaaggaggaaattatggcaaaaagttttactaaagatacatttgctgtagttgatctagagactacaggaacgcaacgtgagaatgggcatcatattattcagtttgggtgtgctattattaaaaatctcaaggtagttaaaacttattcatttttgatcaatccgcatcgtgaaataccacaatcagttgttaatttaaccggaattcatgatcaagatgtagcaaaacaaagagattttgattattatgcacccaaaattactaaaattttgcaaaatactgttttcgtagctcataatgttgactttgatttgccttttttgaattatgaactagtgcaacatggttatgaggcacttacaaataaagcaattgatactgtagaactggctaagattgcttttccgacttttccatcttataagttgagtgatttgacaacacaattggggattaaacatttagatccacataaggcagattctgatgcttatgggactgcagttttattgcttgaaatttttaataaattagaaagtctacctcaagctacactgaataccctcagttcattatctcatgggcttattcgggatacatcttgggtgattacaacgattgcagataatttacgtcaagaaaaacggcctttaggtaaagaatatatgcaagtgcgtaatattattctgcaaaaacaaaatgataattctgaagcacatggtgggaatgctaaattcccaaagactgactcagagaaacaaaagctatttaaaggtcatttacactttcgtagagctcaagtcgacctaattaatcatttgcatcagtttattaatgatccagataaaagggcgatgctaattgaagcacctaacgggactgggaaaactttttcttatctttttgcttatgcttatcagctttattctggtagaaaattagttgtagctacaccaactaaagtgttgcaagaacaagtgattgaacatgaaattccgcagttatttaaggtgactaagttggatttgactgcagaagtagttaagtcaagtagtcgttaccttgaccttgacggatttgtacagacgatttttcaaggtacaccgaataagcaaaccttgatattacagatgcagatactggtttggctgactaagactaaaactggtgatttagatgaattaaatttaactaactataatgcaccactctttgcacagattcaacatccaggggatgcaagagtaggtagccgttttgcaggggtcgatttttggaatttagcgcgtaaacgacaagaagaagcggatatattgttgactaatcatgcttatttggctaaccactatatggatacaatttggggtcagaatccgtatttagtcattgatgaagctcatcgtttcacagacaatgtcgtaagttcgcgtaatgattctttgcgttttgaagctttgtggggagttttaagtcatctccgtaatttgctttatttctcagatgaaagtgttgaagcgcaatttaatgatgatgtgcagctgaaccttttactaaagaaaatagatcctaaaattttggaattaattcagttaattaatgaattacaaaagcaactttattttcaaagagataatgctgttaatcggacagttttagctaatggtaatctagaacttagttttcaaggaaaaagtttatttggcggaaatagcaagtttaaagcgattttacctaagttccaacaaaaattagaagaggttagggacttaactaatcaggttttatttgaattatataatgaacaagaacgcatgctggctaatgttgaggtattagtcaatgagattacggaacaaattgatcgcctagattattactctgaaaagggctatcaattggctgatttgctttctgatcaaaaaggtttagagcaagatggctttattttgatgattactaatcctgatgatccactaagtaccaatttagactggttaatgcttgatgctggtgaagtattaaaacaaatctatagtcgttttgaccatattgccttcgtcagtgctactttaaccagtaatcgaaattttgaatatgcaatcaaccagttagctttaacagaattacatccgattgaatatattggtaaaagtacttttaatataaaaaagcatttacaggtactggcagttaataatatgcctagccctgatagtgaagaatttgaaaagactattgcacaaattttacttagtgacattcaagataagcaccatgtacttgttttgatgactaatttagaaaaaattaaaactgtttttaccatgattatgaatgagccacagctaaaagattttgaaatcttagcccagggattgtctggttccaataaccgaattgctaagaggtttgtaattgctaaaaagtcaattataattggtgctgatagtttttgggagggaattgattttcatgattgtgggattgatactgtttttgcggcaaaaatcccgtttgaatctcctgatcaacctgaagttcgtttaaggcagaagaaattggaagatcagggaatcgattcttttactaaagatagtttaccaagagctgtcattcgttttagacaaggaatgggccgtttaattagaggagaacaggatcatggtcaatttgtaattttagacccaagattatggactaaagattatggtcaagagttccttcaaacgattcctgtcaaagttgaaaaggttactagagaagaattaaaaaagaaattagaaaataaataattatgttacaagatgatacaagacaaacaatcaagtttgtgagttgggtaattggtttgataatagttgcctttctagccagcattgctatcttttattatgctggatctagaagtcggggcaatgatcaaaaagttacgcaattggctactagtaaaacaccaattagaaagattcaaaactattatcatttagatcgtggcactagcagctatgctatagcaggcaccaataataagggaaaacaatattactttatttatttgccaaattctaaaacggcatatctatatcctgcggccaaaggaatcactgaatctaagattaaaaataagtttaaatctatccatacggatgctacaataaataatattaatcttggttggtataagggtgaggccgtttggaaagtggcctacaaaaaacaaaacggcaatctaggttatactttatatgaattcaaaaatggaaatgatatctcagaagtcgataatttatagaaactttggtattatggaaactgtataattgatgaaaaggtggataggattttatgacagaattgatttcaattaaagattcttctaaacatgttgatgaagaagtcaagatgcatgtttggttaacagataaacgatcaagcggaaagattatctttttgcaattacgtgatggtactgcatttttccaaggggtagtacgtaagaatgatgtatcagaagaagtatttgatactgctaagtcacttagacaagaagcaagtttttacattactggtactgttcatgaagacgcacgttcacactttggttatgaaattcaaatcactgatttaaaagtggtttcaaacaatgaaggttacccaattggtaataaggaacatggtgttgactttttacttgatcaccgccacttatggttaagatcaaagaaaccatttgctattatgcaaattagaaataccatgtttaaggctactgtagatttctttgaaaaagaaggctttatcaaatttgatgcacctatctttatgcattcagctccagaaggtactactcaattattccatgtagaatactttgaccacgatgcatatctttcacaatcaggtcaattgtatggtgaagccggtgctatggcttatggtaagatctttacttttggtccaacttttagagcagaagaatcaaagggtcgtcgtcacatgactgaattctggatgatggaaccagaaatggcttggatgcatcaagatgaatcgttagatattcaagaaagatatcttgcctacatggtgaagcaagttctagaaaataatgaatatgaacttaagattcttggtagagatcctgaaaaacttcgcccaactactgaaggtaacttcgttcgtcttccatacgatgatgcaattaaaatgcttcaagatgctggacgtgatattaagtggggcgatgactttggtgctccagatgaaggctatatttcagaacaatatgatcgtccagtcttcattgtcaactatccaacctcaattaagccattctatatgaagaagaatcctgataatcctaaggaatacttatgtgctgatgtaattgcaccagaaggttatggtgaaatttttggtggctcagaacgtgaaggaaattacgaaatccttaagcaacaaattcttgacgctggtttgaatttggaagactaccaatggtaccttgacttacgtaaatttggtggagttcctcactcaggtttcggtatgggctttgaacgtactattgcttgggtttgtcaccttgaccacattcgtgaagcaattccattcccaagattgattaacagaatgcaaccttaatttggttaataattaaatattgatacacaaagttggactagttattagttcaacttttgtttttgaaaggaaattattttggaatttaatgattatcgggcattaggctttacaaccttacaaaatggattgatcgcttactaccctcaattaggcattagtgatgctgaactaattttgataatccaattggaagcatttagccaacgaggtgagagttttccatctaatgaaaagattgctgctaatactaatttatcggttagtgatgtgggtaatcttattcagcggctaattgaacgaaattatttaactattgaacaaatgactgatagtcaggataaaattggtaataaatatagtctcaataagttgtataatgcacttgatcactatattgatcaaaacgtcttgatcaaagataagaaaaaagataaaactgtttcagttgctaataatttagaaaataatccgttaaattatttatcacgaaaagtagaagttgaatttggtcgctatctgagtccaattgaacgagaagagattgcgcaatggttaagtgtggatcactatgctcctgaattaattgaacttgctttgcgagaggctgtattgtctcaggcatattctttaaagtatattgatcgtgttttacttaattggcaaaggcatagtctgaaaacaactgatgaagttgagagatttttgaaaaggaatcgataaaaatgacagaagatttattgagtgatgaagaagcacgtaaagttttgaaaaaaattttagcattgtatcctgacgcacaaggtgaattgcaatgggatactaactttcatttactttgtgcggttatgttgagcgcacaaacgactgataagatggttaatcgtgttatgcctagttttagtaaaatgttcccaaccccagaagtattagcaaaagctccaattgaagagattgagcatgagataaaaactattggtctatttcgttcaaaagctaaacatttaaaggccactgcgcaaattttggtcgataaatataatggacaggttcctaaggataaaaagttattgatgaccttaccaggggtgggagagaaaactgctaacgttgttttggctgaaggctatggtgtgccagctattgctgttgatactcatgtgtcacggatttctaaaaagttccatattgtagatgacaaagctactccacatgaagtagagaagcgattagaagcaattttacctaaaagtgaatggataaaaacgcaccatgcgatgattctatttggtcgttatacaatgccagctcgagctaaaggcgatccgtattcttatttaaattccgaaaagtaaagccgaaataaattcggctttttttattgaataattttatataatctgttgttactaaattttaattttataatttcaggcctcaactacgtttcggccaaaataaaaacaaataacaaaacgctatctgttaataaatatatttaattattgcctagtcattatccgaatcatcattacgttcatgtgattcttcctcaggttttctcgttgatgaactttgttgtgttgaagaagattgtgtttttctttgagaggaagaggctcgctgactgctattggattgagatgatgagccattttcacgacttgatgatgattgagtaactgcagttctagaagatgaaggagtagttccagtattatcgcttgaagtatcagtttcttcatcgtcttcatcataacttgctgcactattaccaattccggctggggcatggcctcgaacaaataattgccaagtgccgccactagttgctaattctggaggattagagttatttacaattttcgctcttacaactgagctaggctgtttccagtctaggttaggtttattgttcattaggtaggtcatcatactcttatacattagctgtgcagattgttgacctattccagagatagtaccgtcctttaaattatcgtaaccagtccaaacacccataacatatgatctggtataaccaacgaaccatgaatcttttggagttgaattatagcttgggtacttagctagatcttcatcagagtatttaacagtaccggttttaccagcttgataaagatctgcaatttttgcattagtaccagagcctcgtttgattacgcctttaagcatatcggtaatcatataggcagttgatttcttcattacacgtacaccatttgaatcataatttctagttaatccatctggtgtttcaatcttagaaacaaattgcggcttgtggtatacgcccatggtggcaaaagcactataagcaccagtcatttgtaaactagacgcattagcgccaattgcaactgataagccggattttgatgaaacgttaacgcccattcggcgagcaaaagctgaagcccgttttactccaacttcagcaagagttttaacagctggaacattacgtgactgctccaatgcatgtcgcatagtcatcatcccgtcgtatttgttgtcccagtcatataattggatattggtaccaggataaacatacttactgtcatcaatcatttttgctgttgaccaattcaagtattgaatagcaggtgcatagtcaagtactggcttaattgacgaaccggtagagcgtccagtttgaacagcccggtctaatcctaattgaacagaaggtaagtgacgtccacctaagattgcaacaacatgaccattgtttggatcaactacagttgcaccaatttgcattttattgtttgtaaaaggtacagaaccgttgttagctaactcgtacagcttgttttgagctttttgatcgatattaatagtaatctttaaattatcgtgatatggatcaaagcctttgctcttaacttcagaaattacctctttaatgtatggatcatcaatttttctaatcttagactcgttattatttcgatgtgatttaagtcccttactaattggttcagcaactgcttgattgtactcagctttagtaattttgtcattttgtagcatagtctttaaaacaatatcacgccggtatttggccttttgcggataaagatatggatcatatgcaacaggtgcattcggcatccctgcaatcaatgcagtttgtgccaaatctaacttacttagtggcttaccatagtagtagttagaagcagtacccatgccataatttccatagttcataaagactttattaatataaaattctaagatttggtctttactgaattcatgttggactttcatagctaaccaagcttcttgagcttttctcttcagagtacgttgagaagcagcagtagagaagaccgttagcttaactaactgctgggttatagtagaaccacctgcagcaatactattacttttggcattagttaacatagaaccaataattctaattgggtcaacgcctaacttatctttgtaaaaacgtttgtcttctactgaaactacagcatcttttaattgctgaggaatgtctttatttttaacataaattcttttttcagaaccaagtgatagtaaaaacttaccattattagtatatagacttgaagatttaccactctgcaattggtcctgactaatgttaggagcatctttggcataaaaagcaaaaagcccgattccagagattactattaaaaatatcagcaaaaagatccatttaatgattctaatccataagtggccactacttggccttcgaccatgatagtctcttcgtgattctcgtttcatattattgttattatctgccatgattatcttttcctatctgcaatgaatttatctaccgccttaagataaggcagtgtaggacgaaagccacttttgatttcaaaagaattgttttcaatttcttttaaagtcattgagcttttatctttttttcgccaagctcgaattacaaaactagctggagtaacaaagtagcgctctaagctagcgaacctaataattgtaaaacaaattccttgttgttttaagcattcgtccaagtgaaaaatttggtgttcatgaaagttttttaatgggaagttagttttattccgtgtttcttttgcctcaaaatcgagatagtatcctttataaacaccattatagtcagttgttgaagcttgcctaaagtaagcttcacgaatgaccgccttagaacgtttgggataatcaactttaacaatttgaattggggttggctttttatgaacaactgcaatttcttccattaaataatatttattagattcattgatttgttgctcaagtgtcatcccacgatcagaaaagttaacaccttttttatgatgatatgatcggtgaactggatgttcatcttttttagttacaggttttctaaatgcggctaaactaccgctaggatatttgaccattgtcctcactcctgttagcattatagcaataaagactacatttttgaacataaaggggggcttaaacaaatgcagcgtttatgggtgactggctatcgcagctatgaattaaatgtttttggcgatcgtgatcccaagataactgtcattaaatatgccctaaaaaattatctgacaagtctactggatgatgggcaattggactggattattactggagctaacctcggtgtcgaacagtggacagctgaggttggacttgaattaggagaaaaatatccggtaagaacatcaataatgattccatatgaagaatttgctaatcgatggaatgatagtaacaaagctaaattcttaaatttgaaggaaaaagtggacttttttgcttcaacttctaataccccttatcaaagtccacttcaattacgtaattatcaaaattttatgattcagcatactgatcgagcattgatgatctatgattcagagcacccaggtaaacctaaatatgattataatttaatccaaaaataccaggaaactaaagaatatccattagatttaattgatttttatgatttacaagatgcagctgaagaataccaagaaaatcatcaaataaatcatttttctgaataatatggtaaaaattttattaaagtctgtttctttattttcagtcagcgttgtttttgctaaaatagggtggaatgtaaaggagttgtcagtaagatggcaaatttaaatgatataaaattatcaggacaagatatattaaagaaacaattcaaaagtaaagtaaagggatatgatcccgatgaagttgatgcatacttagatgaagtaatttctgattatactacttttcaacaaattatcgaagatttgtatggtcagatcggtacgctccaacgtcaattaatggatgaaaagcaaaaagcaaagaaaacagttgaggctgaagaagaaaaggttaagacttatatgccaacgcatagaagaagtgcgtctgtgaagtttgcagaagatgcagatgatactcaaggtgaaatttcgactaatatggctattattcaacggatttcaactttggaaagaaaagtttataatctagaacaacacgtttatggattaaagcattaatttttgctataatgactaacagtgtgaattttgagtaggcgcggctagcttatgttagctgaggaaagtccacgcacacacagactgcgatgtttgtagtgatcgtattcagcctaacaagctggaggaggacgttagtcttcacggcggaaaaagtgctaaatcttcggacatgcattactatcctgaaaagtgccacagtgacgaagcaaggtcagaaatgactttggtggaacgaggtaaaccctgcgagtgtgaaacccaaatttggtgggggagtttcggcctaaggaaatgaactaaaggtcggattattgctttaagcagtaaagatagatgactactgaaggtaatctttgccagagattattggaacaaaacgtggcttatagaaattcacacaggcagagttgggcttttaggtccagctcttttttattttgaaaatgaaagagtaacaatgaaagaataccaactttacgcaactatgggcgctggttttgaaagtgtcgttaataaagaattacagtctatggggtataagacccgtgttgaaaatggtcgtgtcttttttaagggtggtcaagaagatatagttagaactaatctttggctgagaacagctgaccgaattaaaattttgctaaaagagtttagagcaacagattttgataccttatttaatgagatttatgattttgattgggccgaattattgcctgttgacgctaagtttcctgttcaaggtagagctgtaaaatccaaattgcactctgaaccagatgtacagtcaattgtaaaaaaggcaattgttaataagatggttgaccagtaccatcgtcgtggctttttgccagaaactggtaatgaatatcccttagatattcatatttataaaaatgtagctcgaatttcgctagatactacaggcgctagtttgtttaaacgtggctatcgagtagagcatggtggagcccctatgaaagaaaactttgcggccgggctattaaaactaactccatataatggtactcaccccttaattgatcctatgactggttcaggaactttagctattgaggcagcattaattgctaaaaatatagcaccaggaacctggcgtaaatttgcctttgatggttttgactggtttaaccctaaactacataatgaagtattggcaaaggctaagagtgaagttaagccgcttgaagcaccgatttgggctagtgatattgatcagtctgttcttgaagtagctaaattaaatgctcacaatgcaggtgtattgcaagatattcgctttaaacaaatcgcagttaaagactttactactgatctagaaaatggaattataattgcgaacccaccttatggtaagcgattgaaggatcgtgagtcggcagaagagctgtatcgccaaatgggagaagtacttagaccgcttagttcgttcagtcagtattacttaactgcagatcctaactttgaaaaatgttttggtgcaaaggctactaagaagcgcaaactatttaacggaaatttgcgggttgatttctatcagtattgggctaacagaaggtaagaaatgattacaaaagagcttaacacagaattttgggtgatctcagatacgcacctaatcgcagatagtttacatgatgaaggacaagccttttcacgcatgcaaaaaactagtcaaggtaaggatttgtattatcaagaaatagccctttctgcttttatgcgaatggcacaaagaaaaaagcctgccgcaattattgtaactggtgatgtgacatttaacggtgaacgagtttctgctgagaaatttgctcaaatttttaagccgttgaaagaaactaaagtgttagttttacctggaaatcacgacatttttgatgggtgggctagagaatttcgtggtaaaaaacagttctatgctggtgaaattagcccaatgttttggcgctcgatctttgataaatcatatcgtgaggccttagatgaagacgataattcattggcttacagtgtccaactgaatccgcaatatcttttagttttagcggattcaaatatttatggaaaagaagagacaacagaagcaccgcacactcacggcgaaattggaaaagtacaattaaaatggattgaaaaacaatttcgttatgcgcaggaacatcagttacgtccggttttatttatgcatcataatttatatgcacataatccagcagttaacaagggctatgtagttgatgacgctgttgagctacgacgtttgtgtgcgcgttacaacgtgaaattagctttttctggtcatattcatgctcaaaatattatgggaccacaagacatgacgcctacaactgagatcgttacatcaagtttttgttctaatgatcaaggctatggagtagtgcgagttcattcacggcacattacatatgtgcggcgtaattttgatatgacaagatatttaacggatgaggaaaaggaaaattatactttagttcattatcataagtatttaaaagatctacagcttggtagtatttctgcggatatgatgcaaagtgaattaaatcagtatcacgaagacatcgagttagttagggcgatggggaatttgtttggctggatgaactatcatttctttaatggtcataatcatataaaggctagcgagttgaataaaatccatgcttctaaagaatatcaagttttgattaagcaccatcctgagtatcggttatatctaaagacgctgtacgacacaagtgatcactctaatttacaagtgaagatacgatactaaacaaattttagtataatggatactgattctaaagaaagcggacatgattatgttaaaagatgaaacaaaatttgatcaattagggcaaaagctttttatgaaaggtgttttgcaagacttcgaaaagaaaaatggtccaattaagggcagaatgatggttacagaaggaaagattccgccggaaatgttaactaagctgcaatctgaattgatgaatagtagtaattggattgtagttgaaggtagttttgatttttataattatactgtcggcatgattgtagatttgactacaggtaagccattagcaaatggatggttggtaccacaattgggtcacccagggatgcaacctgcagagaaatggcaagaatttttgattgaaaaagtcgttgatgcaatcgatgaaaaaggtaagattaatttgccgctatatgtttggatttcagatcgtagtgatttgaccaagacggatcaagatttataaaaatatttttaattatgtaaagcttaatagagtagagggagttttataactcgcccctctcattgcaccggacgtacggttccgtatccggcgctacgtttgtgattatttacgagataaataatattctagcggatcgaccaagcctgggcgatccgctttgcttatgcccaatacttttgggctaagcagaaagttaatgacataacccgtacttcttttataccaacctaagcgcgtattagctactttatgaatatcttcatcactaaaattgcactttagtgccttgttaatccgcattaagttaatgtatattcgttttggtagtttccattgtttaatgattaccacccgtactttatgacgcagccattgactgaacttaattagaaaatatttcatgtcgccaactctaaagtaattgacccagcctctaactacttgatttatcttagtaaagactagtgatagaggctgagcagctgcttttctgcgacagagaagttctctcatcttgtcataaagcttgattttgcggtcatctcctggctttgcttgccagtattcgccacttttccagaaggtaaagccaagaaagttgctcttggttggtcgtacaactttggttttggttgcgttgacctttaggaatagctttctttctagccatgatgaaattgaattcatcacacgtttggctgatttaccgcttttgacaaagatattgcagtcatcggcatagcggacaaagcgcaggcctctttgttccaattctttatccattttatctaaatagatattggatagaattggtgaaagagggccgccttgtggtacacctagtttattaggcttaacccaaccatcttccattactccagctttaagaaaggctcgaattaaatggagggtggttttgtcatttacttgctctctaattattgaaattaatttatcatgatttaccgtgtcaaagtatttctcaatatccaggtcaacaacccattgatagccttcgtttaaatattccaagacttgttcaatagcgtcatgagcactgcgtccaggtctaaagccatagctatgctcactaaaatgaggatcatagatcttcattaatacttgggcaatagcctgctggattactcggtcaacaaccgtgggtattcctaaaggacgtttcttaccattagctttaggaatgtagactctgcgaacagcttgcggacgatacttcatcttcatgatggcgtcctttatttctacttgatgctttttaaaatagctatcaagctcatcaactgttctcctgtctacaccaggcgctcccttattgattttgactctcctgattgcttccttgagattattttgacttaaaatctgttcaattagttccatctcgtgatatctccatttctacttgtaaatttattcagaattgtcccaattgctttcaccatcaaagagttacgttctctttgtgctaggctatcctcttatccggactgtctgaacattgcttatagcgagatatgctcttacaaacattaggcccttcgctccagtttcattacaaaaccttcagcactactacgacctcagctgacttctcgcgattaacctttttcgaccaggcttacgatcgctgatattaaagcttactcggtttcacctgtccacgagatctctcggggtaagacattcatctttaattttccactgccccctggtttaccgtcttggttttacggttgtcctttggactttaacttgtgctgcagtctcatccaccatttggcctgaccaggtttctgtacgtaggctcggaaaactcgctagccacttccttcacccatagcgtcaccgctaacggcttgtggttcgctacacttggcgacaactacccgtgatctagactttcactagactagacaaatgccatgcccgacacacaacaaaaaggtaggtcaattttgacctaccttttttaggatttatttattagtattaagaagttattgaattaagtaagtagatattatttaaccagtttaattttcaaagtgagctagttattaattgcctgagcagatttttgagcatcccaccaatcgggtaaatcacacaataacttatttaatgtattattgcggtgcgaaattgagtttctctcattgagattcatttctgcaaaggtttttcctagttctggaactacgaataaagcatcgtaaccatagttactgctaccatgtggatacttagcaattaatccactgattctaccagcactaacaatatcattgctttcttgacctggccaagtaaagacaaaggtagtgtagtagctagctgtccttttttcactagaaactccacctaaatagcctaataatttagctttatcatcttgaccattatggtggtaaggcaagattcctaaagagttaagtagataatcaacacttagacctgagctttctgataatgtaggcaaattggtaaattcagctaaacgatgtgctgtagctctagcattacttaaaaatgttgcctcagaatatgacttttgtggtgcataatctacttcagctaaaccaactactttgataggaagactaagctggttaagtttatcttgtaattcattaattttattttggtcatatgttgtaaataataaactatccattattttccccatgctttcaaaaatagatataccatttatattgtatccgctttcatatactgcacagtcattgtcttatctttgtgaagtaaagtcaagcatagataatagcttttatcaaaaagtccatatacttcaggtttttaaactgaataatgttatttttaatgactaagattgtgaaaattatagaaactgtcaaatcttttgtgtaaatagatctttctcgtaaattgattttttaattatttatttaatcaaagtaggattctaaggtgtcctgaacctgaccaaagcctttatgaattcgattgaaataacggtcattgtagctcattgcctgaatgccaataaaagcatcaagcgactgttcagttggaaactctgccttaggcttagctttgcgcttgatcacattgttaaatgattcaatcatgttagtcgaataaattgaagctctgatctgcttgggatagttataaaagaccagcagatctggttctatgtctttcaagcttctgataacatggctgtaaaccttgccccatttggtatagaagtcatgcaggacagctgtggcttcttctttgtttgtctgttgatgcacctgtttgaattcgttcatgatcttttcacgatcgtcgacgcgtactttagcgcagatattgcgcatgacatgaaccaaacagcgttgaaaatgagctttaggataagtcctggccaaggctgttttcatgccaacaacaccatcagaaagaaaaagctcaacttgctttaagcctcgggatttcatgttttgaagcatatctgtccagacttcaatgttctcgctaggcgcaatgcagtagtcaatgacctccttgtgcccattaggcttgatgccaatggcaatatagactgcttcacgctcaaatgtttctcggcgcaaaggaaggtatgtcgcatccaaatagacgcagaaaaacttgtcgcttagcttgcgtttgtggtaagcctcaacctttggaatcatctgcttggaaatatttgatacctgagctggactgtaatggctgccatacatcttttcaattagatcggctatttccctggtggtcacgcccttggagtaaagcttgataatcatgctttccaagatatccgagtgctgcttgtagtcaggcagcgtgtgctgatgaaattgaccgttgcgatcccgaggcacttgcacttcaattgggccaaattgcgtatcaactttgcggaaataagcaccatttctagagttgccagtattccagccatttctggcatagggatcatagcccagaaaggcggtcaattcagcttctaacaagttattaacagcctgttgtagctctttgcgcaataaatcatttattttgtctggattgaatagagcttgagcaaaatctttggtaaaatcattcatgaaggagttcttctttctgtatgtgtttttttgttcaaaccaatcatacgagaaaggaactcctttttctaatgtttaaagaaataaatttaaggaatcattcatccttacacaaactattttacagtctcaaattataatatgaattcatttcaatttatattacttttatatttataacaatcttgtataaccttttgatatataatttctctgaggttgtttttttatatgaaaaaacgaaatacatttatcacactaaacttgtatcaaattacacaagatagagtgattaatcaattaataaaaaaataaaattgtattttaataaaaaagagaaaatcttttttagattttctcaattatgattaactagctattaaaaatttccataatgcattattggtgtaccagttttgcggttgaattgctcctagacaggctacaataatataaattgctaatgttgagattatgaatgcaatgcctaagttgacaatgttgaatggaaaggtagttttatgttgtttcattgcgatgtgaatggcgaaagccaacagaaccaaacctataataattccaaattgataataaatgctcattttctctcctaagttacagttaaaagtatacgttaaaatcggattaaagagtgatttttatttatctagcctctttattttatcaaaatcaatgttatattagagaggtagaaagaagattatgtacatatgtctgtagatatttacaatgaaaaacttgaaccatacgacgatggtaagcgtcataaatttagtggtacttttgatagattaaacgatcgcttagctatttttaaggatttgcgtattgcaggtgctggtggcaatccaattgttaagcagttagcactgcattacttgaaaactttcaaagaccttgatttgaagaggggcgatgtagttgaatttgaaggcatggttgaaaaagattctaacaatggcttcacaattgaacgcccaactcaagcagaaaaaatcagatcagcagctgccgatgatgctaaagttgacgtggttggcgatgattggaattggtttgaaaattagttaacggaagtgacttacgagatgtaagccgcttttatttttgaaatttaagtcatagctagaaatgtagtaaaattaagcttgtaaggagaattagatgcactttgatatctttaatcgaaaaactgtctcaactgataaaatgtttttccagacaacattaaatcctaagcaagcaataatcattggcaatggtgctaaatttcgacgttgggttttcttttctactaattttgctacattttatgtaatcattctgtcagctattagtattttattaattaagtctaatgtttctgtactaatttgcttactattagcattagcaaatttagtaattaatcgctcaatacctcgttattggcaaactttctttggcccgaatgctgaatatggaaaaaatcatcgtccagctattttgcctattttatatatcataaccttgttcggttggctttggagcgtatcacatttcgtaggatctttaacttttattactggtacatttgtgctagtaggtcttgcaggtagtttgttatcgctctggatatggatgaatttgaatactgttagttgtgctccaatcagtgaattacaatggcgaaacaatgccaaacgcaggggaatgtctgatgaagacattgataaggttattgctagtttaaaaaagcgtagagcaatatattttagtaaacacgataaataaaattatagacgaaagatagaatttaatgacagattttacagaatttgaaagtacaattttttcatcagacgataattttgccattcgaaaaattaaacataatgtcattttgacgtattgcactcaagatggtgaaaaagaatatgaaagcctaagtaagaatacatatcgtgtattttttgaaaataatcttgaagttagtcgactgtatccacctgatgaattcagtcacaattggctaatccaaattttaatgccgcaactttcaattgattcgctcaaatctatggcgattgccttaactacattagaaagaattgcgcaaagtcaagaaggcatgcaattatctgaatatgttaaaaatagtgagttagtagaaataaagtcctggtttgatctgcgtaataagttgcgaaaaatatccaaagcttatagcctaattaagcaaagtactgatcaaacaacacagtggctaggaagtgatggacatcgttatcgtgaagtgattttagccaatagtttacggcttaattatggtcaagatgaagttgttcgtttaattccaattaaaaataattgggttattcagtttgttaaaactgatttcagtgcaactgatggcgtaattgatcagctttttgtggcattaacattattgactcaatatgtaaaacaaatttaaatcagagatgaaacatattctttatgcccttaatgggacttttttaatgttactcgttccggctttatttgtattagcattacgacaattaagccatgaagctaaccaaaaattggtaaatacatttggttttaatagtcaaattattgttggcggattaggaattattgttcatgaacttagtcatttgattatggctataatttttggtcatcatattaatgcggttagtttattgcgcatccctagtaataccaatgatatgtcacttggctatgttaaacatacttggtctcctacatctacttatcaaaaggtgggtaatgcttttattggcattgcacctgtattaggatgcaccttgctgatttacataatcatgcgtacattgaatacacctatttcattggttcagaatcagcttactactcagttattaagtaatggtaatgcacttaactggaatttcttaactcatagttggatttatatttttgaattatttcagcttaattttgattcaatatggcactcaattgttgctttattgctagtaatcagtctatgttttggtggattcgatttaagcgaggctgatataagtagtggcaaatatgcttttttaggattaattggtataacctttattatgcttctcttagtttcttttctaggctttcacgctgcattattaccgtttttagttaatattactgtctggatttatttggtattcattatatcaatagtgattttagcaataattaatttaattatgtatattttaaatattattttataaaggagaaaataatggcaaaagcgttattagttatcgactatagtaaagactttgtagctgatgatggagctcttacttgtggccagcctgctcaagcaattgatcaacgtattacagaactgtgtaaacagtttctacaaaataaagattgggtgattttcccgatggacgcgcacttaaaaaatgatccatatcaccctgaaactaaattatatccaccgcataatattattggaactgctggccgtgaagtatatggtcaaacgggtaaatggtatttagaaaacaaagataatgatcatgttttattaatggataaaaatcgttattcagcttttcaaaatactaatctagataattatttacgtgaacgccatattcatgacctgacactaactggtgtttgtactgatatttgtgtattgcacacagcgattgcggcatataatttagactatgaaattacaattccacgttctgctgttgctacttttacatcaaatggcgatgaatgggcaatggctcactttaaaaatgcattaggtgcgaatattgctgattaatttaatggcctgcataatttactagtaagtccaattattactatctaataaaaatatacattataattaatgtaaaggaaaaagctatgtaaagtgaagaggtcaaaatgtatacaaatattcgtaaatttaaaaagggcggaaactacccggaacagcaaaatgggctaccacaagcattttttcataatcccaagtataagaagttaagccccgatgcatgatacctatacatgatacttacgatgagaatgattgattcacaaaccaatggatgggtagatgctgacggtaatatgtatattatttattctaatcaagagctaatggatgacatgcattgcaattcttatacggtgaaacgactaaagaaagaattggttaatcatgatttgttactcgaagaagatgctcctgcagaacatgatgataggttatatcctttaagaattaatgaaaacgaaaaatgataaaagacattggtaaatacggccaatgtcttttatttagtattagtaaagaaaataactaatgtatccgcatcaggataaggctctgaatgaacacttaagaaattttgcagtttatgattgtattcaatattattttcactttgactattttgataaatttgctctagccagctcggttagccggataaatagcattgttcatggcggaacctacagcgttactttgaacgtcatttagtaaatatgatgtcccaatttgattaatttgattgagtaaatgatctatgcgttctatttcctgcttcttatcatgtacgtttggcacaagcagtagagagacggctgtaatatccatttcacattgtgcccaaaatttatcataaagcttgctaaagttttgatctgattgagctaaaagccattcctggtagatttttaaaatacgaattgttttttgaatatcatataaataaagcttacgataactaaactgctgaaattttcttgtaattccagaaagtagttctgtatagcaatctaagtcttcagcaattttaattgccgagtcatttttatttcctttctgtattttatttacattagctgatacttatataagtctatatgataatactgtactttctatacttttattataagatcatcgcatgatttgttaataataaaatgctcactaaaaatgttgtgacaatttattattaacaactaaaaaattatgatagtgtaagtagtaataattatgaaagagcgtgatgtaaatgtctagatggcatagattatttcctgaacgagtttttgatcgtggagaaatatattatggcaatgatatggttgaaaatattcaattagctcaagatcaggaacactttaccgctcaagttcaaggcggaatgggtcgttcttatactgtaactggtcgtcttcgtttagatggtcgagcttcagagttagactgtaattgtccatgggctaataaagggcatcgctgtaaacacgaggttgcggctttacttgcagtagaaaacgaacaagaaaatgaacataacgttaaagtcccttttgctgacttaatttctgaacatcttaagcaaatgattgcacataaaagcccagtacttaaccccttaaatttgattggcaatatgaaatttaccaaaaaaagttatgatcaggcactggaacttaatgatcactggtcgattagtagttgtcggcattttgatgataagatgcgtaaatatgaatatttttgggagatagtaacagaggacaatgagttaattacattatctgtgcaatttactcgctggcaaattatatcaattaaatttgatagtgatttttcccgtattgaaaaagatagtgttagaatattagctctgttttactttattaatgagtatcttgatgacgatccatttgatttaactaaccaggccgctgaagatctacttgaattttatagtgacgcttctacccaaaatgatgagccgattattttgcgggcaagtattgataagtataataacatccctagtttgacgtttaaattaggaaagaacaagcatctttataaagttaaagatcttaatcaactagtagatgcatcccgacacagctcttctctaaagctaggtaagtttttcaacgagcctataaatcaggctaaaatggatattgatagtcaacactggttatcttttattgaaaaaattatagatgctcgtaatctaaacgaagaattttattataattacagtagtcaggttggtcgcattacactagagaactctgtggccgatgaagttaatgatttactttatcaaggcgtaaagttgtactcaaatgagcagcctataggatatacaactgatcaactagatttaaacattaaaattgaaactcaaaagtcatctgctttagttagtgtagaggatcttccagtttctactataattactgggagtcatgcgtattatggctattacaaagatgtatggatcaaatatataggtcttacgcctgcttctttgcataatttaggattgcagcctggtgctgaaatgcaatttagtaaaaagaccgttgctaagtttgcacataatattttgcctaaatttgagcaaacaaagtttatattagtgtctggtactgatgaattgaaagctattttgccaccagaggcccattttttgtttaaattagattatcgtgtaggcagtattttatgtgtggctcgagtacagtatggggatgcacaatacgagttaaatcaaggatatactgaagaggaccgacgcgatgttgaaaaagagaccgcagcatggaagcacattaatacatattttagtgattatcagcatgggcggtatgttttatccaatgaagactcggatgtcgtacaagcttttctagatgatggtatcaatgagttgaaacgattaggcgaagtacaaattacagctaactttagatcacttttaaagggaataaagattaatttggatgttggagtaggtatcaacctgactaatgaattattagatatcgatcttgctgatcaaaagatgagctgggaagacattcaagcggctttgaaagcctaccaagaaaagcgaaaatattttgttttaaaaaatggaatgctagctaaggcagaacaaccgacaattgaacaattggcacaaactttgcatgatttaggtattagttttaaggatttcattcacggtaaattacatttaccagcatatcgtgccttttattttgctaagcaaatgaaagctgctaatgcactgcatttctcaactaatgaatcctttaatactctgattaatgatttagctaagaatcagttgaagcaaaatcaaataccagttagtttgcaaaatattttgcgtccatatcagaagataggttttaattggctaagcactatcgttaattataaatttggcgggctacttgctgatgagatgggattaggtaaaaccttgcagattattagtcttcttttagctcgcaaagaaaaaatgcaaaatcagttacctagcttaatcgttgcgcctgcttctgttatctataattggcaggcagaagttaaaaagttcgcacctagccttaatgtggctctattagatggcactaaaaaagaacgagagagattgcttttagatgctaaaaagtataatctgctaatcagttcatatcaatcgcttaatcgagatctagaagcgtaccaaaatctaatttttgatgtagaagtaattgatgaagcacaaaatattaagaatcagcaatcagttaccgccaagacagtcaaagtcattaaagcgcatcataaactggctctaacaggaacaccgattgaaaataaattgagcgagttatggagtatttttgattacttaatgccaggttttttaggtttatatcctgactttaggaaaaagtatgaattaccgattgttaaagagcaagataaagaagcagaagatcaattagctaatatgataataccctttatcttgcggcgtctaaaaaaagatgtgctacgtgacttacctgacaaagatgaagaaattgtgcctgttaaaatgaataagaaacaagctgatttgtataatatgcagacgcaaaagattatcgctcaattaaatggacagggggatgaagactttaagagatcacgttttcaaattttggctcagattactaaattacgtgaaatttgttgtgatcctcatttgctttatgaaaactatcacggcaagtctaataaattaattgctacaattgagttgattaagaataatctagcaaatggacataaaattttattgttttcacagttcacagctatgctagatattttgcatgaaaaccttgccagattaagactacctttatttactattactggatcaacacctaaaactaagcgtcaagaacaagttcaaaagtttaatcaaatggctcaaccaggggtctttttgatttcattaaaagcaggcggaacaggcattaacttgactggtgctgatgttgtaattcattatgatccttggtggaacttggctgcagaaaaacaggcgacggatcgagctcatagaattggtcaaaagcattctgttaagatttataagatggttacagaagacagtattgaagagagaatcattgctttacagcaaaagaaagcagaattagctgatataattttgcaaaatgatcagattgctgatgcaacaatgagtaaagacgatttaattaagattttgaaataaatagatcattataataaaataaaaatatttgtttgtacttgcgaactattgtttgcaaaagtataatatttaggtaaacaaaaaccaacaagctaaatgcttgctggttttataattttagtttgagttagtatgtttctttttataccaatacactagaccgaatggaaccagattctcttggtgatgttcgattcgaataatattgcttcggtgactccagtaaattaagattacgagcaatccactgataatgctcaaggcaagatcgtggaaaaagaatgaagcaataaagattagaactactgagatcaaactagttaatgaaaccatacttgtaataaataagatagggaagaagattaacgcacagatcaagaaaaaatggacattatatcctagtaaaaatccagcggaagttgctactgccttgcctcctttgaactttaaaaagacaggaaaagcgtggcctaaaattgcagctaagccaaaaatcaagcaaagataatgtggtcctagtttaaaaattattggtaatactgtagcaaaagttcctttgagaaaatctactataaagacaatgattccagcagctggtcctaatactctaaaggtattagtcgttccgatatttccagatccgtatttcctaatatctttatgaaaaaagatattacccactaacacacctgttgggaatgatccaatcaagtatgctaaaataaacaacgatgcaaattttaatgcaaacatatttaacaacactcctattaatctatcgctattttagcaaagattatcttttaaatatatggtgctggttaaattaatgaacaagtggaggaattttagtggcaaaagctaatacttatgatgattcttcaattcaaattttacatggcctagaagccgttcgtaaaagacctggtatgtatattggttcaactgatattcatggtcttaatcaattagtgtatgaaatcgtcgataactctgtcgacgaagccatggctggttttggtaaagaaattgatgtaatcattcattcagataatagtgttactgtaagagactttgggcgtggtatgccgacaggaatgcacaaatcgggtaagcccacaattgaagttattttaactgtattacatgctggtggtaagtttactgaacaaaattataaaacttcaggcgggttgcatggcgtaggttcatccgttgttaatgcactttcaagttatatgaaggttagagtcgttcgcgatggtaaagcttatgaagaagaatttaaagatggtgggcatccggtaggtacattaaagtgtgtaggaaagacaaaagagccaacagggactaccattacgtttaagccagatgagactatcttttcaaccacgaagtataagtatgagacaattcaggagagaattcgtgaatatgcttttctacttaaaggggttaaatttttcttaacagatgagcgtgagccagaacatcatgatgtttttcagtatgatgatggaattaaatcatttgttaagtatttaaacgaaggtaaaggcacaattagtgatgtcttttattttgaaggcaagcaagatggcatggaaattgaattttcaggtcaatatagtgatggatattcagaaaatttagtttcatttgttaacaatgttagaactggtgatggtggtacccatgagtcaggtgctcgtagtggatttacacgtgcatttaacgattatgctaaaaagcagggtctactaggtaaaaaagataaaaatattgatggttctgattatcgtgaagggcttagcgcggttttatctgttaaaatccctgaagaattacttgaatttgaaggacagactaagggtaaattaggtactccacaagcacgttctgctgtagattcacttgtttatgagaaaatgtcttactatttaatggaaaatggtgagctggctcaggaactagttaagaaggctcaaagggctagggatgcacgtgaagctgctaaaaaggcacgtgatgaaagcaggaatggtaaaaagagacgaaaaaaagaagttttgtctggtaaattaacgccagctcaatcgcgaaatcctaaaaagaatgaactattcttggtcgaaggtgattcagctggtggatctgctaagcaaggtagagacagaagatttcaagcaattttgcctcttcgtggtaaagtattaaatactcaaaaggcaaaattgcaggatatctttaaaaacgaagaaattaataccatgatttataccattggtgctggtgtaggaaccgagtttaatgttgatgactctaattatgataaagtcattatcatgactgacgccgacgatgatggtgctcacattcagatcttgctattaacattcttttatcgttatatgcggccgatgattgaacacggaaaagtttatattgctctgccaccgctttatcgcttacaaaaaggtcgaggcaaaaagacgcaagttcaatatgcatggactgatgaagaactagctgatgatgaaaagaaaatgggacgtggctattcgctgcagcgattcaaaggtttaggtgaaatgaacgcggaacagctatgggctactactatggatcctcaatcgagaatgttaatcagagttaaaattgacgatgctgctcttgctgagagacgagttactaccttaatgggtgataaagtagccgcaagaagaaagtggattgaagaaaatgttaaattcagaatgggcgaagacggctcaattctagaatccgaagatgaataaaagaaggttttaaatttaatggccacaaaagaacgaattcgagaaatgccacttgaacaagtaatgggtgaacgttttggacgatattcaaaatatattattcaagaacgtgctttgcctgatattcgagatggcttaaagccagttcagcggcgtatcctttatgcaatgtatcaagatagtaatacttatgataaaccatttaaaaaggctgctaaggctgtcggtaatatcatgggtaactttcaccctcacggtgacagctcaatctatggggctttagtgcacttatcacaagactggaagatgcgcgaaccgttagttgaaatgcatggtaacaatggttcaatggatggtgatggcccagcagctatgcgttatacggaatcccgcttaagcaaaatctctaatatgcttttgcaagatattgataagcaaaccgtaaacatggtgcttaactttgacgatactgagtatgaacctacagtcttacctgcacgctttcctaacttattagttaatggatcaactgggatctcatctggttacgctacagagattccaccacataacttaggtgaagtgattgatgcaacaatttatttattgaaacatcctgatgcttctcttgaagatttgatgaaatatgtaaaaggccctgactttccaactggtgctattgttatggggactaagggaattaaggaagcatataagacaggacgtggtagaattcaagtccgtgccaaaaccactattcaagaaattcgtgggcataggcaagaaattgttgctacggaaattccattcgatgttaacaaagcactattagtaaaaaagatagatgaaatccgtctgaataaagaaattgatggaatcgcagaagttcgtgatgaaactgaccgccatggtttgtcaattgtgattgaattgaaaaaagatgctgatgcgcagaatattttaaattatttatttaaaaatactgacttacaagtatcttataacttcaacatggtcgctattgatcacatgactcctgttcaagttgggctaaaacgaattttagcttcttatttagaacatgaagaagacgttgtaactaaacgtacgaaatttgacttagataaggcagaagctagattagagattattcagggcttgattcatgccatggatattttggatcaagtaattaaaaccatccgcgcttctaaaaataaagccgatgctaagaagaatttaatagctaagtataataaatttactgaaaaacaagctgaagcaattgtttctttacaactttatcgtttaactaatacggatgttaatgaattaattgctgaacaagacaagttaaataaattggccgaaaaataccgtaaattattatcagatcgtgcaactttagaaaaagaaattattaaagagttaaatgcagtcaagaaagaatttgctaatccacgtcgaactcaaatttcagaagaaagtgctaaagttgaaattgatgaaaaagccttagttgctgatgaacaggttagagtactaattagtcgagatggctatttaaagcgttcatctttacgttcatatcagtcaactaatgatgatgacaatggtttaccagatggtgacaaagtagtttatgaaaacacactatctaccctgactaacttgtatttatttaccaataaggggaatgtcatttatcgtccagtacatgaactaattgaaaccaaatggaaagaaacaggacaacacctatcacaagaaattggattagacagtgatgagcaaattattcgcgtctttgtatttgataaattgaatactgattgcaactttattctggctactaatgacggttatatcaaacaattggagttagctaacttacagccgacgagaacttataagtcacgtgcaatgacagctatcaagttaaagggcaaggatagttatgtagttggggtagatttgatcaaatcagataatcataaggaaatcacattatttactcatcgcgcctatgcaattagatatgatgttagcgagataccaacttcaggagctaaagcagtaggtgttaaatctgctaacttgaaagatgacgattatatcgtaaattatgtcctagttgattctaagtatgttgatttaatgcatgttgggctaattactcaacgtggggcatttaagcaattcaaacttaaactagttaataaagtttctagagccaagcgaggggtactagtactgcgggaattgaagaataaaccgcatagaattgttgctctaatgccatatgctcaagatcatttgttacatgtcactacttctagtgaccgtcatgtaaatattaaaactacggattatccattaggcgatcgttattctaacggctcatttgttattgatactactgttgatgggacgcctgtaagtattgaattgggaagacccattagtagtcaaaattaagatttgagtttaactaaaacaatatattaatctttaaaaacagtgttaagacatatgttttgacactgttttgttttggatagataatagcagtgttatgggacatggcttatcgtaaaataatattttaggaaagagataatcgttatgtctaaaagtgatactattttatcggctaaatcattgcgttattttttacaattgattgagacgatgaattatacccaagctgcacaaattttaggtattacccaaccggctttaactcagcaagtaaaaaaattggaacgcgctattggtgctccattatttggacaaatggggaagaagttatacctaaccgaagctggtaaagaaatggaagcagcagcgatagagttgctaaataccattaatggtgttattagtgacattcaagaatatacccagtcagataaaggcaatatttcaattggtattctagagtccgtacatgttgatcttttctaccaatttttacgttacttcaataaaaagtatccagaagtaacttttactgttgattactttgaccgcaaagagctatggcacagacttgattccaatatgattgatatggcgattatgtatatgccagatactactaataaaacaggagctaatttccgtcatcaatacaatcatcgtgatatttgccctgagcatattgttgtactgactcacaaggataatgtggaagcaggagggacatattctgttactcgttttggcaacagaaagtgggttgcatatccggagaattactacttatcaagattaatgcgacttaactttagtaaaaagattgatctcgttactccgtttaaaattgcatctactaaggaaatgatcaaaattgcagaaaatactgatcttgatacttatgtagatcagacttactatgaggcgcataaggatgagattaatttgactcctgtttatattaaaaatatgcctgagtttacgactgcttgtgtttatcgtagaggaaaattagatgttcctaggatgaagaaattactaacggaattacagattttcttagacaataacttggataggaaccataattttagtaaactattaagtgaagaaattaaataaaataattagaaaaagaggcaatttatttaatggaaaaagaatttgtttttggacaccaaaatccagatactgatgcaattggcactgctattgcattttcatatttgcaaaacaagttaggttacaacactgaagccgttgccttgggtgagcctaatgatgaaactgcatatgctcttaaaaaattcggctttaaagcacctcgtgtaattaaagaagctgctccagaagttaaatctgttatgttggttgaccacaatgaaccacaacaaagtgtttcagatattgacaaagttaaggttactcatgttgtggatcaccatagaataatgaattttaataccgctgatccattatattaccgtgcagaacctgtaggctgtacttcaaccattgtttggagaatgttcaatgaatttggcattgaaattccagaaaactacgctggtttaatgctttcagctattatttcagatactttacttcttaaatcaccaactactacagataaggataaaaaggctgtagaagcattggctaagattgctggcgtagattacaaggaatacggcttagcaatgcttaaggctggtactaacatcagtgacaagtcagaagaagaattgattgatttagatgccaagagctttgaattaaatggtcacaacgtccgtgttgcacaaatcaatgttgttgacttacctgaagcgttagaacgtaaggaagcctttttaaaggcaatggatgcttcatctaaggataatggctatgatatgtttatgcttttaattactaacattcttgactcagattcagaagctttagttgttggctctgatgagactaagtcattattcgaaaaagcatttaataagcaacttagtgattcagaagttgaattacctggtgtagtatcacgtaagaagcaggttgttccacctcttactgatgcttttaatgcttaaaagtaatgatgtaaaaaataggaggtagggttaaccgcctcttattttttacctaaaaattaaaactgattttaggagaaaaatattgaaatacccacaattaaatttagaaaatcaacagggaccaacagctgtattgaaaaccaatcaaggtgaaataaaaattcaactttttccagaacaagccccaatgacggttgaaaattttattcgtttagctcaaaaaggctattatgatggtactatttttcaccgcgtaattagcgattttatgattcaaggtggagatcctgaaggaaatgtcactggtggtgaaagcatttgggggcatccatttgaagatgaactttcacgagaactttttaatattcgcggagcattatcgatggctaattcaggccctaacactaatggtagtcaattttttatcgttcaaaacaagaatatgcctaagcgttacataaaacagatggaacccgcaggctatccaaaggaaattattcatgcttataagcaaggcggaactccatggcttgacggtcgtcatacggtctttggacaagtaattacaggcatggatgtagttgataaaattgctaagtcgaaaaaagataaaatggataaaccactagaagatataactattgattcgatccaagtccaaggatcaaagtttgatgactaacaaaaacgtgctgttttttcggaataaacagcacgtttttgttaattattcatttcttttagaagggtgatcaaagacttacatacgcgttcagccttaggttctggtaattttcttaattcgttaataacttttttcatgaaaacgggtgtattgttatcatgaattttttcaggcttgatttttttagcacgataggcattgttaatgatatcgggtgtagtagtattcaaagctttggcaatagaatcaagcttctgaatactaatgttttggtccttagtcctttccacacgtgaaataaaatttacagaaagatcacttagctcagccaaatcttcctgtgttagtttctgttcacgtcttctacgagaaatttcttctcctaaattaatattcacaagcattcgatcctttcaagtaacttatagcctatataaaattatgtaaaaaatgaatagactattttaatattctcaacatacacttatattaaataataagaaattatatttgtttataaatgtacatttttagcgtaatcagtgctattaggcactacagtttagaaactgtcaaatcttttgtgtaaatagatctttctcgtaaattgattttttaattatttatttaatcaaagtaggattctaaggtgtcctgaacctgaccaaagcctttatgaattcgattgaaataacggtcattgtagctcattgcctgaatgccaataaaagcatcaagcgactgttcagttggaaactctgccttaggcttagctttgcgcttgatcacattgttaaatgattcaatcatgttagtcgaataaattgaagctctgatctgcttgggatagttataaaagaccagcagatctggttctatgtctttcaagcttctgataacatggctgtaaaccttgccccatttggtatagaagtcatgcaggacagctgtggcttcttctttgtttgtctgttgatgcacctgtttgaattcgttcatgatcttttcacgatcgtcgacgcgtactttagcgcagatattgcgcatgacatgaaccaaacagcgttgaaaatgagctttaggataagtcctggccaaggctgttttcatgccaacaacaccatcagaaagaaaaagctcaacttgctttaagcctcgggatttcatgttttgaagcatatctgtccagacttcaatgttctcgctaggcgcaatgcagtagtcaatgacctccttgtgcccattaggcttgatgccaatggcaatatagactgcttcacgctcaaatgtttctcggcgcaaaggaaggtatgtcgcatccaaatagacgcagaaaaacttgtcgcttagcttgcgtttgtggtaagcctcaacctttggaatcatctgcttggaaatatttgatacctgagctggactgtaatggctgccatacatcttttcaattagatcggctatttccctggtggtcacgcccttggagtaaagcttgataatcatgctttccaagatatccgagtgctgcttgtagtcaggcagcgtgtgctgatgaaattgaccgttgcgatcccgaggcacttgcacttcaattgggccaaattgcgtatcaactttgcggaaataagcaccatttctagagttgccagtattccagccatttctggcatagggatcatagcccagaaaggcggtcaattcagcttctaacaagttattaacagcctgttgtagctctttgcgcaataaatcatttattttgtctggattgaatagagcttgagcaaaatctttggtaaaatcattcatgaaggagttcttctttctgtatgtgtttttttgttcaaaccaatcatacgagaaaggaactcctttttctaatgtttaaagaaataaatttaaggaatcattcatccttacacaaactattttacagtctcacagtttatagtatagtcttaaattgaatacttttattgttaaaatagaaatgaaataaaagctaaaaaaaatatactaattattaagtttttaagcttataatgtatacaaggatataaaaatagattggggatttgatgagtttaaaagaggttttaaatagtaatcggcctgcagagtcacgacaattagcgtgtgcgttaactttttgtgggggatttattgatgcatatacatatatccagagaggacatacgctttccgctggacaaacaggaaacgttatcttttttagttcagcattagctgatcataatgttcctggaatgattaatcgagctagtacgtttattgctttttctttaggattgctattagtaggactttttcataaatatgtgaaaagtcactattggagagtattttgcttatttccaattttagcgatttgtattgtagtgggctttttgcctaaaagtgttcctaattattatattgtgcctgctattgcgtttggattggctattcaaaacgcatctttcagcaaaattgaaggcatgggttataacaatgcatttacaactggaaatttaaaaaaatcggttgttgcatggagtgcatttttttttggtgaagacaaaagtaaacatacagctgccgttaattatatgatgttaacaattgcatttgcagttggagcaataatttcagctttactgcaaaaattattggtattaaaaactatttggattgcagtcatttttttaacgacgattaatttagtttatatcattgcattgagacgaaataaaaaattgatttttcaaaatgattttaaaagcacttgtcataattggcaagtgtttttttgaagaggttgtgagtgagaagaaagcgaccaatctgaaaaataataattttataagtgtgcgtataattaatattatgtaaagtcagattgaaaaacaatcaatttaataatagaagtcataattaatttaattgtttcagcaaataagtcttattttggatttgttaactcgaattcagagactgtaaaatagtttgtgtaaggatgaatgattccttaaatttatttctttaaacattagaaaaaggagttcctttctcgtatgattggtttgaacaaaaaaacacatacagaaagaagaactccttcatgaatgattttaccaaagattttgctcaagctctattcaatccagacaaaataaatgatttattgcgcaaagagctacaacaggctgttaataacttgttagaagctgaattgactgcctttctgggctatgatccctatgccagaaatggctggaatactggcaactctagaaatggtgcttatttccgcaaagttgatacgcaatttggcccaattgaagtgcaagtgccccgggatcgcaacggtcaatttcatcagcacacgctgcctgactacaagcagcactcggatatcttggaaagcatgattatcaagctttactccaagggcgtgaccaccagggaaatagccgatctaattgaaaagatgtatggcagccattacagtccagctcaggtatcaaatatttccaagcagatgattccaaaggttgaggcttaccacaaacgcaagctaagcgacaagtttttctgcgtctatttggatgcgacataccttcctttgcgccgagaaacatttgagcgtgaagcagtctatattgccattggcatcaagcctaatgggcacaaggaggtcattgactactgcattgcacctagcgagaacattgaagtctggacagatatgcttcaaaacatgaaatcccgaggcttaaagcaagttgagctttttctttctgatggtgttgttggcatgaaaacagccttggccaggacttatcctaaagctcattttcaacgctgtttggttcatgtcatgcgcaatatctgcgctaaagtacgcgtcgacgatcgtgaaaagatcatgaacgaattcaaacaggtgcatcaacagacaaacaaagaagaagccacagctgtcctgcatgacttctataccaaatggggcaaggtttacagccatgttatcagaagcttgaaagacatagaaccagatctgctggtcttttataactatcccaagcagatcagagcttcaatttattcgactaacatgattgaatcatttaacaatgtgatcaagcgcaaagctaagcctaaggcagagtttccaactgaacagtcgcttgatgcttttattggcattcaggcaatgagctacaatgaccgttatttcaatcgaattcataaaggctttggtcaggttcaggacaccttagaatcctactttgattaaataaataattaaaaaatcaatttacgagaaagatctatttacacaaaagatttgacagtttccgaattcaggttatttattttttcaaaaatgaattttgcttttttaatttttgtttttacttcatttactctgactatgataagaaaatcaactctcaataaatttttacatgctgagatcgcaattctatgaccaagttcatttattttgatcaatagttttatagtttaatagttagttgttcatttgtatgaaccagtttttaaaagtaatggttttattgatggttggaattatagtttttcatcaagttaatcaagctagataaaattacttttatggctaagagtaaatcaatggtatcctagatattcttgaaataattttttagatgattagttatctgtatattttatggctaaaagtctgaattgaataatatgctgacaataatcaataaaacaaccttcaaagagaagtattttgaaacaattatggtaaagtaattctaattaaaaacaatgaaaatagttgagtaatatttgctagttttgcctttagtatctataaagccattttttatttttatgctatagctttctttaaaacaaaaattttaatgatcgctagataaacctatctcgcaaaagcctaattttggtaaatttgtgcttttgttatttttattgttttaacgttttgtatttcattttaaattcgtaaaaaaatattttataaattctttgctctttttgctacatacaaatcggtattaagtgcttttatatttattcttattccctatttttaagatttgctgcaataatacacatattgaaatttcttaaataaataatcaagcggtaaaaatgataattctactaaactcatgactcaagtcgctacttaaatctgtgtttttacatgaataagacatctaaataaagtttcaatcttcaaaaaatgctgagaatcactctaagatttctttttaatgaattaatttatcgtggttactcaatctttatacaaacaagcaacattttaattcattattatacctctatctcccctcctctgctgaccagggaagacgaaaaaagagccgaaatcagacataattcgtccaatcaggctctttgcttatctagctagaataaaaatctgaataaactcaatctgttgcaggtctaattttattcataatgaaggcaacgacgattaccaagataactgcacctaaaattgacggtacaattgccatgtccgcaaccttcggtccccattcccctaaaagggcttggcctagtgaagatccaaccaatcctgctaaaatattagcaatccagttcattgacttaccatgtccagttaaagcacctgcaattaagccgattactccaccaacaattaatacccaaatccaatgtagcattttgatcacatttgctttcttgcaaaatatcttatcacatttctgattaaacaaagcgctttctttaactatctttattttgagactgtaaaatagtttgtgtaaggatgaatgattccttaaatttatttctttaaacattagaaaaaggagttcctttctcgtatgattggtttgaacaaaaaaacacatacagaaagaagaactccttcatgaatgattttaccaaagattttgctcaagctctattcaatccagacaaaataaatgatttattgcgcaaagagctacaacaggctgttaataacttgttagaagctgaattgaccgcctttctgggctatgatccctatgccagaaatggctggaatactggcaactctagaaatggtgcttatttccgcaaagttgatacgcaatttggcccaattgaagtgcaagtgccccgggatcgcaacggtcaatttcatcagcacacgctgcctgactacaagcagcactcggatatcttggaaagcatgattatcaagctttactccaagggcgtgaccaccagggaaatagccgatctaattgaaaagatgtatggcagccattacagtccagctcaggtatcaaatatttccaagcagatgattccaaaggttgaggcttaccacaaacgcaagctaagcgacaagtttttctgcgtctatttggatgcgacataccttcctttgcgccgagaaacatttgagcgtgaagcagtctatattgccattggcatcaagcctaatgggcacaaggaggtcattgactactgcattgcacctagcgagaacattgaagtctggacagatatgcttcaaaacatgaaatcccgaggcttaaagcaagttgagctttttctttctgatggtgttgttggcatgaaaacagccttggccaggacttatcctaaagctcattttcaacgctgtttggttcatgtcatgcgcaatatctgcgctaaagtacgcgtcgacgatcgtgaaaagatcatgaacgaattcaaacaggtgcatcaacagacaaacaaagaagaagccacagctgtcctgcatgacttctataccaaatggggcaaggtttacagccatgttatcagaagcttgaaagacatagaaccagatctgctggtcttttataactatcccaagcagatcagagcttcaatttattcgactaacatgattgaatcatttaacaatgtgatcaagcgcaaagctaagcctaaggcagagtttccaactgaacagtcgcttgatgcttttattggcattcaggcaatgagctacaatgaccgttatttcaatcgaattcataaaggctttggtcaggttcaggacaccttagaatcctactttgattaaataaataattaaaaaatcaatttacgagaaagatctatttacacaaaagatttgacagtttctttattttaagcgaatgaactatttcttgtcacttttaaaatatattatttgactgtcttatacttttctttagatttggggcatatttcttgccacgactaattctttattttttgtctattgtatatctcaatttgatttcaatttttttcggtttgattactgatatattaataaatgatctcatctattgccttttgagaactatatctgtagtctataaagtataaattatgtgagagatatagataagattctctccactaagtatggaggacataaattgtttaaaaggaaatcaattattaaattagcatgtgcaactatgttaacgaatgcaggtgtcacacttttatctcaaatgactcgtttctctgactcagagagcattgtgcaagcttcatcaacatcagttgttgctaaagcccttggaattgatgttgccagctaccaaagcgcagatttaactgctcatgccaaggctggttctcaatttgcaatcgttaaagttagtgagggaaccagttatcgcaaccctaaggcagccaatcagattaaatctgctattgctaatgatatgatgccgatggcttatcattttgcaacttttagttcaagttcatcggccgctaagcgcgaagcgcaatacgcaatttcttctgctaaggcgttgggattaccagctggctcatacttagcctgcgattatgaaactggtcagggcaatatcattactaatggtaaaaatgtgacagctaaggctattattgcctttatggatcaaattaaggcggctggctatcaaccacttctctatgctagttcttccgttttgcaaaacaatattaatactccatctatcgtgaacaagtatcctaattcactctgggtagccgcatatgcgatttcaggccgagtagaccaacccaactttaaatacttcccttcaatggatggtgtcgcaatctggcagttcacagataattggcgcggaatgaatactgatggcaatattacagtcttgccattatcaatcgcaggtaacgcggcagtttcacaggctcctaaggcttccaataccaagaaaacagctacagttatgtacaagtcatatgtttatgacaaaaatagcaaccggacaaatgatttttataatgcttacagctctattgcttattatgacaataaggtgagaattaaaggcaaatcaatgattcgtgtcggtgaagacaagtatgtgatggcaagtaacgtactaggcaattcacgcgtctttaaagctgatgctaaagtgtataaaaatgatggcaccattaatacaaaatggtctactaaaaaatccggttcaccgatcaagacttatggccctaaacattacatcaataatgaagcttactatcgaattggtaaaaatgcttacgtcaaagcagacaagttctaatttatttttagcagcaaatatttgctgcttttttgatgcatccctaaaacgtaaatgaactgacaaatcatttccaatttatttatctgcatcccttttttatccatgttaaaattaaggcattatatagaaacgaggataagataaggatgaaatttaaaaagaagttagctttattcttaggtctgggagtattattgctttctctgactggttgtagtgattttcaaaactgggaattatctatgcgctctaagattggggcattgcccttaacagtatcaacgtatgattctaatggacaaaagatcgaccagatcaaagctaagtcagttaatattcatactgataaaaagatgtcacagaaaagtagtaatggcactgaacattctagcgtaattgatgttgactatggcaataatcgaatgattcacgttggttctactatgattgcctatgaaggactgaaaaactacgaggatgcatttaacaaaaaagttaagatcgacgatcaaaatcgttctgttcctctgttaaatacaatgtatcagaattttaaaaacgattggaatggtagctcaagagtagtaatgattagaagccaattaggaatgccgattgctgtctttattggaaatcacgtctcaattcataagagtgatatgaagaatgcaactcaatttgtgattgatggtcatcgtctatttgtttaccgtgctgattacacagtttatccaatgtccagtttaaaaagcaattaactataaaaagtgtcaatcctcattttaaggactgacactttttattatttatcatcaattaatgcattaaatgcttcattagtttcaacgatgtcgctcattacttgattaatccagtcattaagcttatcgttatcgtagttttctaaaccgccttcggaatctccaatgtccgcaataccattattgaaatctactagttcagtaattaacttttgagcaaaaatcttagtggtaccaccaaagtttttcgcaaaattatttacatccccatatgcatcggcaatatcactgaaaactgtgacagttttaccaaaagtctcactcaagttatctacatctgcttgagttggtacagtcaattcttcatcttcattattaagttgttcatctaaacgaacgccaatgtcgtttaacactaagtgaccatcatatagacgattcagtaatttgataccactagggtttttagcttggaagtttacactaatttcttctgtcatactttttcctcatctcacataatgtattttcatctattgtacaatttttagccaaaaaatacgactaaacaaggaaaatagaaactgtcaaatcttttgtgtaaatagttctttctcgtaaattgattttttaattatttatttaatcaaagtaggattctaaggtgtcctgaacctgaccaaagcctttatgaattcgattgaaataacggtcattgtagctcattgcctgaatgccaataaaagcatcaagcgactgttcagttggaaactctgccttaggcttagctttgcgcttgatcacattgttaaatgattcaatcatgttagtcgaataaattgaagctctgatctgcttgggatagttataaaagaccagcagatctggttctatgtctttcaagcttctgataacatggctgtaaaccttgccccatttggtatagaagtcatgcaggacagctgtggcttcttctttgtttgtctgttgatgcacctgtttgaattcgttcatgatcttttcacgatcgtcgacgcgtactttagcgcagatattgcgcatgacatgaaccaaacagcgttgaaaatgagctttaggataagtcctggccaaggctgttttcatgccaacaacaccatcagaaagaaaaagctcaacttgctttaagcctcgggatttcatgttttgaagcatatctgtccagacttcaatgttctcgctaggcgcaatgcagtagtcaatgacctccttgtgcccattaggcttgatgccaatggcaatatagactgcttcacgctcaaatgtttctcggcgcaaaggaaggtatgtcgcatccaaatagacgcagaaaaacttgtcgcttagcttgcgtttgtggtaagcctcaacctttggaatcatctgcttggaaatatttgatacctgagctggactgtaatggctgccatacatcttttcaattagatcggctatttccctggtggtcacgcccttggagtaaagcttgataatcatgctttccaagatatccgagtgctgcttgtagtcaggcagcgtgtgctgatgaaattgaccgttgcgatcccgaggcacttgcacttcaattgggccaaattgcgtatcaactttgcggaaataagcaccatttctagagttgccagtattccagccatttctggcatagggatcatagcccagaaaggcggtcaattcagcttctaacaagttattaacagcctgttgtagctctttgcgcaataaatcatttattttgtctggattgaatagagcttgagcaaaatctttggtaaaatcattcatgaaggagttcttctttctgtatgtgtttttttgttcaaaccaatcatacgagaaaggaactcctttttctaatgtttaaagaaataaatttaaggaatcattcatccttacacaaactattttacagtctcggaaaataagcttttttcgattctttataaaaaatgttatattttacttgaacattagcaataaagagcataaaataaacgattgaaaagtgttgtaccatacaaacaacatatgtttgtaagtaatgtttgaattactaaatgtaatttgcccttacttactgacgagcaatcactgttgctataattagaatgctaagagttttctataagcgttgctggtattctagttatagtgacatgattatctaagttaaatttagttgcaatcatttttctacgttagtactatagatattcacgttcgaatgagcgcagtaattttaaattagactgttttttatcacctattcctgagaataggtgatttttttatgattaacgtatttgtatgatataatataaacattagttcgcaaaaggagtagatatggaaactgctaaatacctagaattgatccaaattgaagtaaataaattgcctgattttgttaagcaatttaatcttggtactaatcattcattaactactacttaccagtacttaactgaaattcgacgcttcttcgattggctacgtcaagaaaatatctcttctgcttcagataatgctcatgttactacggatacattagccaacttacgtcgcaatgacataatgctgtatattgattatttaggacatacccgtaataagcaaggccgactaaactcccccactacgattaatcgctcaattaatgctttacgctccctatttaagtttttaaccattactgccgacaataatcatggtgagccatattttgaacggaatgtaatgcttaaaattaattctttaaatgatacgcaaacacttaattatcgggctcatgtacttgaaagccacatgtacactggtaagttaaaatttgaatttttgacttttattgatcaggactatattaaccattgtaataagcaagcaaagattggttttaagcaaaacaaagaacgtgacatggcaattgctgcattaatcttaggtaccggcattcgggtgtctgaatgtgctggcgttgatttgagtgatttaaaccttaaggatgctgtactagatgtaactagaaaaggcggacaaaaagatagtgtaccaattgcagaatggacacttccttatatcaagcgatataaaggtattcgtaatgaacgctatcatgcagatagtaagcaagtggcattctttttaactcaatggcatggtcaaacgcggcgaattacaactaatgcaattgaaaaaatgatcaataagtattctgcagcttttggtcatccccttaccccacataagttacgtcatacggttgcttctgagctctatgaagtaactaaagatcaagtgcttgtagcacaacagctaggtcaaaaaggcacttcagccaccgatctatatactcatgttgatcagaaaaaacagcgtgcggctctcaatgagatctcaaaaaaaaatcacgattaatcaaattaaatgcaaaaacgagtttggctattcaattccaaactcgttttttattaatgtttcaatttcttgtaagcttttttggagccacgatctagatcacgattaaacttataatcttgacagtctttaacaaagagtaaatctaagttatatccttttgggtacaagtctttagctagtcgtcttaattgtaaacgtctgagtggtacttctacaaattcttttgtcacaaatatctttgctgcattttgggtaggaagatatttataaaagattccttcttcttttaaattggtagcatatacaatatcacctttatgaaattcttttttaacaaccaggttgcttttgtttttacgctggtgaacgaaacttttttttaaagataaaggtaaattattgcccgctaatatggcttctgcttgatgcaaaacattttctggaatacctgattttttggcgatccatagtgctcgactattaccaatacttcctatctttaacttataagtaggttgcagattttttaagtcaaaatccattgcagctgtgataaaaccatcatgctgcttagcaaaatccttaatagagctgtagtgtgttgtggccatgattaaacagccacgtaaatacaactcttgtagaattccaatagcgagtgcgcttccttcatttggatctgtccctgtccctaattcatctaataatactaaactatggaattgagcatatttggtaatcatggcaatatctttcatttcggctgaaaaagtactcagagaattatctaggtcctggtgatcacctattaaagtaaaaacgtcatccattaatggaatatcacatggtttatcgcttggtaaaaacagacctagttcggtcattaaaatcatcaaaccagtagttttaagcgcgacggttttaccaccagcatttggtcctgtaatcattagaacactattttcttgggttaattctaaggttaacggaacaggattaatgatcaagggatgccgcactgcacgtaaaacaagagaattttcacgattaattttaggcctaatacaattatatttttgtgcaaactttcccctagcaaaaatcatatctagtaaagtgattagttcaatgttacgcttaatatcatccttcacgtcgtatatttttgcagttaaagcacctaagattgctagttctagattacgtatttgtgcctttaaattggttatttgctgatttagacgaacaaccttagcaggttgaaagtagacggtttgtccaccattagaaacagccacaatagtccctgacaattgatttttgtagtttgctttaattggaatggtagcgtagccctctttttcaacgatcattgcgtctctaatcatcttttgattaggtttactagtcaaaaaatgatttaatgcagttttgagttcagtaacagatttctttaagtcgcggcgcatttttgctagttcacgatctgcctcatcgcgtacttgacaatgttcaatagtagtataaatagcatcttcaatgtcttacaatagcgtcatgtcttggacatatgcattgagtaatggtgctagctgctcatgtctggctaaaaagcgttgtagtaggcgatttactcgtaaaaattctgctactttttctagatcatcaggagttaagattagtcctttttcagctttagtaattaaatgctcgatatcctcagaactggcaaaaggaatgtgctgccgtaatttcaaaatcttcacggcttcttctgtttcattaagcagttgttctactttatgtaaattgctacttggttggacggaacttaattgttctttggcagcaatagtaattgcctgttgagctaagatatctttaacttgagtaaagtttaagttttgattattgttgatatttttcaatttgatgtaatttccttatgtttaatttaacgctgattgtaacataaaaagaacattaaaataaatactatagtaaaacagttattaaattaattcctatatttcccggatttaaaattgaagtgcaacactaagtgttaaacaaaaaggccatgaagacctaaacttgaagtgacgaaaaatcaagaaaggaagatctttatgaccaattcaaattctagcatttctaagcactatcatcaattaaccagcgtacaacgtggacaaattcaagcaatgctggattccggcataacttcccgtactgttatcgctcaagaagttggctgccataagtcgacaatcagtcgcgaaatcaaacgcggaagcgtcctgcaaagagacagcagctatttattgtatgagcactattacgctgatactgcacagatttattatgagaagcgtcgcaaaaactgctatcagcgcaatccattgaagcattatgctgtctttttgagaatgctctccagacgctttaaagctaaatttgatgccaccagcatcgatgagttcgttggtgaattcaaaaggactatgccaggctacccttgtcccagcacaccaactgtctatcgctatattgatcagggcttgctggacataagcaatattgatctgcctatgaagctcaaaagacgcaggaacaagcgtcatcacagccatggcggtcacgctttgcacaagaagcatcttggcaattccattgaacagcgtcctaaagagattgaagacagaaaagctccgctgcactgggaaggagatctggttaaaggcgtcagacgcaagaatcagcctgctttaatgactttgactgaaagaaccacacgctttgaagtagttatcaagattcctgactatcgggcaagcacatgccaaaggctgcttcaaaaggagattgacagacatcctgcctggtttaaatcaatcacgtttgacaatggctctgagtttgcggatatgaccaagatcaagggctgccagatttactttgctcacccatattctccatgggaaaggggcaccaatgaaaactgcaatggtcttttgcgtcaattcttccctaagggcaagagcatgaaagacaagtcaaaagcttatgttcaacaggcaactgatgccattaaccacaaatatcgccgaatcctccaatatcacacagcagaagaactcttcaagcaatatatttcctcatagcctaactgttgcacttaatttgacaattcaggtaattcctatattttatgataaccatattactatttcctactatagcaattttactataacattcagcactagtatctcaactgtaatttttaattacaaatctattatcgtaaaaagggtaaacaaaaaagaccatagtttgtactatggtctatggctatttgttcttattttaattcgagcttatcaatatcaaccatccatgcaattgcaattgatttctctcctaagtgtgtagcgattactggactaaattcagctacatcaactggcttatctggaaagttttcattaacaaattgcttaatttgctccgcttgctttaaatcatttgagtgaaatacaaacaagcgtagcttatctttataaggcaaatttgctgtcttctctaaagttaatttttctaccttagaaacagcacgctttaatgatctgatcttatcaaaagcaacgatttttccttcatcattaaaagttaacaaaggcttgatttgaagcattgtcccaataaaagcaccggcattgcttaaacgaccaccacgacttaagtttttaagatcatctactacaaagaattcatcaattgtcttacgtatctcatctaacttctttaagatagcctctggttccataccattttttatcattcttgcggcagctaacaccaagtagccttgcaatctaactgtcatcttagaatcgtatggatataaattatattcaggattgttatgtgccatatttaccatattttgataaaagcctgagataccactggacaaagtgatagcgataatagcttcatagccttctccgtgtaatttattacataattctatcatttgccccatgctgggctgtgaagttttaggaaaagcagcaccttgtctctccatctcaaaaagctgggtggaagtgatattaacgccttctgaatattccttatcacctacgatgacaggaataggaactacattaatatcattatttttaacttcttgatcagttaagacactagtactgtcagtaactaatgcaattttcaatttattaacccttcccatatctaatttagcatagaaaaattatagcataaaaggcacctatcacgcaccctattccattttttctagggtcatagaagtatcagcgacttgatttaattgcttaataaataaattagcagcatctctgtcaaaatagacaaataataaattctcaatcttagtcagagttttttttagttctttagctttagtcacgccagcttcacttagattcacaatcttgcttgaatctttttccgatctagtgatattaataaagctcatagtcttcttttgctgcaattgacgacttaaggttgataatgaaatattaagcgcttctgccagcttccccatcgctaatgcttgatttttgttttcatcaaaaaatagcaaaattcgagtttgtgaaatatttaagccgcatttgtgatttatttcttttttcacttgatctgcgatcgtactaaaaaataatacatccattcgtatagtcctttttctccaatgtagattactatatacttgtattttatcatttaatatggcatttgataataccaaaaggctaatttatcagtaatattgtataatacaatgcactttttatgttgtaatatacaactgaatgatatagcagaccttgcgtgaaacatttactactgtattgcaggtttcaattatgattagctataacttataaatataatcattttagaatctgactaaaaattgatataatattacacgaactttgaggtgatatttatggcatttgatggattatttatccatagtttattaaaagacttagtccctactctggtaggtggtcgcttatcaaaaatttatcaaccatttgatcaagacctagtcttaatttttagaaaagatagaaagaattatcaatttttaatttcggccaatgcacaatatccaagaatgtatttgactaaacaaaacattgcaaatcctgataaagcacctatttttgtcatggttttaagaaaatacttagaaggttcagttttgcaatcgattgagcaagttggcttaggtcgaattgtcaactttcattttagtaatcgaaatgaacttggtgatcaagtcaagctcatgctttctgtagaattaatgggacgtcatagtaatgtcatcctttataatcaagaagacaatcacattattgatttacttaagcgaattaatcctgatgaaaatagagcgcgtgttttactgccaaaagcaaaatatgagttgcccccactaaaaccaggattaaatgggttgactctatcagaaagtgaatttaaacaattaagtagtgaaaaccagcctaatgaaattgctcaaaaaatggatggcttagataaagatgatcgaactgaattattaggctatcttgaagacgattacacttattcatcttttaagaccttttttaatcagtttgacaatccgcgtgcttttattttaaaaacacctagaaataagcgtaagattttttgttatttgccctatcatttagatttagagaaagaaagctctaatccagatctgaatgctggcttagatgaattttatgaatatcaggcaacacgtgattgggttaagcagcgtgcaggacaagttgaacgtgtagttaagaatgagcaaaataaactaactaagaaagttaaaaaacttgagaagcaattagatcttgctgaaaattcagagggctatagaattaaaggcgaaattttaaatgcaaatttggctcaagtaaaacctggaatgactaaagtttcattacctaactattacgaaaataatgctccattagagattaaattagatcctgctctctcccctgctcgtaatgcgcaaaagtattttactcgttacaaaaagttacgtgattctattaagcacattaatgaacagcttcgtattgctaaggatgatattcgttactttgattcaattcaaacagctattgacaatgcggatccacaggatattgatcaaattacagatgaattgattaatcaaggatatttacgtaaacaaaagaaaaataagcgtaggaagaaaatcattgaacgcaatttaaatgaatttaaactttcatctggtaaacacgtattggttggtaaaaacaactatcaaaacgattggcttactcttaaaaaagctaataaatctgattactggtttcatgttaagaatatgccaggctcacatgtgatcttacgcgatgatcagcctactgatcaagatattaaagaagcggctgagattgcagcttacttttctaaggctaaaaattccgctcacgtacaagttgattatgtgcaagacaagcgtgtgaaaaagcctaatggtgctaaaccaggatttgtaatctacactggacaaaattcaattgaaataactcctgaagaaaaggaaattatgaataaaaaaattgaaaaataaaaatcatcgaactagttagttcaatgattctcataaatgcaaagtcatatcgactttgcattttgttttgcttattaaataggttgagtagttaaagccaatgattctagaacgtctaaaatcaattccgctgtttcgatacttgagaaaacaggaatatgtgtattcagcgcttcatctctgatgcgcgatgcatcttcgctagctgcatcagacaaattagtaatattaacaaccatgacgatcttatgttgacgaattttatctagtagatttctagggtctttatgaaccttctccactactccagtagtaatcccagcttccgcaaacatattagctgttccttcggtcgcaattaatttgaaacccaagcgatcaaatcggcgagctagttgggtcacgcgattcttgtcttcatctctgactgaaataaagattgttccataacttggaatatgtaaatcacttgcttcatatcctttgtataaagccttagctagttgagtatctcgacccattacagaacctgaggatttcatatttgaatcgaaagtattaccacttgaataattaaaaaatgaaaatactggcattttaatatgaataaaatcgctgttttgccatagaccattaggatatcctagctctgctaaatttttgccaattaaagcttctgtagcacaagtagtgatatccttatctagtgattttgataaaaatgctacattatgacctgcatatggtttaatttgcaatagatataggtcattatcaacgaataaatagtgcagattaaaaataccttttgttttcagctgcttaattaatttaattgactcttgctcaatctttttttgctgctcttcggttaaattttgcggctgaatcactgcaattgaatcagaggcatgcgaacctgtttgctctagatgttcaattataccgggcaaagttacattggtaccatcagagatagccgttacctcatatttgtgtccctcaataaagcgagaaatagttatttgatcaagttggttttctgctaaatatttctctattgcaggaacatcataaacaactgcagatttttgcttgttttctttattcataccaccaattaaaagtggaaaaccatatttagaagcaaaagcgaaaacctggtctgtatcagttgttttatttaatgccgggacccgctttaaggtagtaaattgttgatcaagcaaagtagtaatcttatcccgcggatcgtcgtttgccttttgcccaataacgtgcaaaccacatttttccaactctttactcaatgcactgattcttttgccagaaaattgaactaatacatcagaaatattttctcttttagaaacagttagaatattttcaactgtaatggaatcaaaataaactcggtcaatattcttataccttgatgaaatcgattcgtcattatttgatagaagcacagtaacatagccatacttatgtaaagtatcggccgcgtgagcaatcatatagtcaaactcgctagtaaccgaaacttgaagcggcaacatgcccaaaatcaagatctttttttcagcatttaaagcttgtgcttcattttgaacatcatatgcactgtagtaagcacaaacattaggtttatatatacctgctgagccgtcgatcttcaaatatgatggctgcaagtcaattttattaatcaaagagcgaacttcagtaactgatttttgtaaaatcttagctaataatgggttaaagaatccatagactttagcttcttgcagcaaatcacgcgaaggctgctccttctcttgtaataactttttgccaagtcttacaatgtgaagcaatttctgataataaaccggatgcaaatgtgttactttttgtaattcagaatatggaatatcttgatcaattgcggctaataatttaactaaatgcaattcatcaggatgtgccaaatcattcaaaatatctgcagtggatttttctttttcttttataaaagcatgccaacccaattctaaattaatagttgcatctaagcctttcagaaaagcagtttcaaaattacggcctacacccattgcttctccacttgcttgcatgcgacttcctagcaaatagtggttataaccggattcagcaaatgaccaatatggcattttaattgctactgcatctaaggtgggttcaattgaggcattaagtccagatagaggatcggtaatctcattcagtcgataaccgatagcaactttgctaacgacatatcccacatcatacattccaattctttgagcccaaacagaacttcgcgtcaaacgcggacgaatcgtcaaaagcttagatcgaatttgagttccatggtgtttaatcgcaaaatgaaaactagcaaatccaatgagatcaagattagacatgatttttctaacggttattcttaactcttgaatatgatcattgtttagggttaatgatggcatcacaactgcagagtcaactgaattaatacctacagcttcaatagatcccgcaaaattgataaaagctaaattgccatccttatcacggattacgtcaacaattacttcttcccaactagataagtcttcagtcaagcgataattcttccatgtaaaattatcattttgcttttcttctttaaagtaactgattaaatcggtaggatttgcaaattgcaaatgttcgttgtgtacaaaacggttgtacttagtaactaatacgggaaaagtgactttgtcgttaatgctttctagcgcattatctaaattatcctgaatactctgattaagttcccaagattgcccggtatcaatatgtagcttagtaagcaactctgtctttttctgttgattccccatttgtagagcacgcgaattcaatgttagtaactgaattcccatttgttctaaaacgccatcttgtaataacttatgtgcaacctttaaaccattagttgaaccataagctgtcataattgcatctggctcttccatccgtagaattcttttcaggaagtcgagagtcatcggttcaagatagactgttacaccaggttttttatcagttgaaattgtagctggattaggattgaccagcacaacttgaatgccttcttctgtcaaagcatcaattgcttctgttgccataagatccatttctgctacactaccgattaaagtagggcctgatccgataattaaaactttatctaaatcgttttctaatggcatataactaccccatcatctgtaaaaaataatcaaaaatttcatctgcatcattagtgcctggtgctccttcaggattaaaagcagtggcgatcaatttgtccttactgttccagaagcccgccatcagttcactgtgtagatcaaagtattcacgattcatattcatcttcacactatcaggcaacactagttggtcaatattcatcgctgtttgccagatagcattactattttgttcaatcactggataattaataccatcaaattcttgtggtaattgaaccagttcaaagccgagataatcgctcaaagttaaaaaacctaatccgattcctaaaattggatacttaccataaaaatgatctaaaactggcgttagctgattaattacttcttctggttttcctggcccatttgaaataattattccttcaggacgtaagttttcaatatcaatcgggctggcactgtatggtaaaactgtcgtatttacttttcgtaaagataaagcacgcagcattgagtgctttagcccaagatctagcacagctacagttcgtccaacattaggggatgcatatgcattcttagttgaaacagtcgcagatttatttttaggtaaaactagtgctttaatctgatcaaaggcatgctcgtcattagtatccatgatcgaagccttaattgtaccttcttccattaagcgatgaactaaagcacgagtgtcaactttgaaaattgcagggatgttcttttctttcaaaaaagaacttaaatcttcaaaattttcactatctgaaatatttaatgcaatatcgttagcaataatccctttaactacgggatcaatactttcataatcaatggcattaataccgttattaccaatcattggtgaagtaaagactaaaattttaccagcattagtaggatctgttaatgcttcttggtagccaaaattagccgtttgaattgctaattcaccggttgaaataatactggcaccaattccttcacctggaaatgaactgccatcttctaaaatcaaataccgtttcatattatcacttacttgtttgttctagttgagccaacgtttcttgaaaaatttgtggtggttctacactaaactctagccattcgccagtacttggatgtttaaatcctaatactttagcatgcaaaaattgaccatgacctttcaaggttttacgtggaccgtataatgggtctcctgcaaccggatgtccaatatagtcaagatgaactctaatttgatgggttcttccagtttcaagctgacactcaattaagctataatccttgaactgctcaagcaccttgaagtgagtaatagcttttttgcctgtttcaactaccgccattttcttgcggtcatatggattgcgaccaattggtgcatcaattaccccattttcttccgcaaaattaccatgaacaattgcccaataaagacgtttgttagtcttatgagccaattgatcttctaatgattcacgagccttggcggtcttagcgatcattaataaaccagatgtatctttatcaatccggtggacaattccaggacgaaatccttctggtgattgtgctaaggccttgctgtgatataacaacgcatttactaaagtatgatctggatgacctggtgcgggatgcactaccataccttgaggcttgttaactacaatgacatcatcgtcttcatacacgatatcaagtggaatattttcgggtataacatctaacggtttaaccgctggaatattaacttcgattttatctcccgcctgaatcttataagatactttttcgactttgccattaactaggatattttggtctttaaccagttctttaactctagttcgagatagatcaggaatttgttctgaaacaaacttatctaaacgtcccttttcgttttttacttcaagtgaatattctttagtcatgttgttcttccttaccttcaataaaaattaagtaaatgaacacaaggattactccaacagtaattgcggaatccgcaatattaaaaatgttgaagtgaacaaaatcaagctgaagcatatcaactacatattttaaatgcaaacgatcaataaaattaccaacaattccacctaagatgagggctaaacccacatcaaacaaggtattcttgtactttttgttaaaaagaaaatacaagcaaacaccgatggcaataatactgataatgtagaagagccacatttgtccagtcaaaatgttccaggccgcaccattattttgcaaataattaaaggaaagaagcccaggaataatctggtgtacttctcccacagcataatgggcaacaatataattcttaagtccttgatcggcaagaaccacaactaatgaaataattaaatataaaaactgcatatctttttagaataatccgctaattttaccattgttatcaacatcgatatctagggccgcaggatgcttaggcaaacctggcatatctagcacatgacctgtggtaaccacgataaaatgcgcaccattttttaaactaatccctttcacatgaagcttaaagtcagttggagcacccaattcgttcttgttgtcgctaaatgaatattgggtcttggcaataattactggtaattgggctttacctaactttcttaattccgcaatttgcttttcagccttgtcactatattcaactccagctgcatgataaatcttggtagcgactttctcaatcttgtctttaacatcgtcatcatctgcataagttggagttaaatctgccttgccagagttagccaaatcaacaacagcttgagcagcttctacaccacccttagaaccttcgccatgataagtaactacttcagcattaataccttgttcttcaattaattgtttaagcaaagcaagttcttggtcagtatctgaagcaaaacgattgattaacacgatgaccggcacattgtatgaacgcatgttgttcatatgacgctcgaggtttttaaaaccttcttttaaagcatctaggttttcttcatctaagtgatcagttgagcctaaagcttgatacttcaatgcacgaacagttgctacaactactgcagcatcgggcgtcttgtccagatgtcttgagacaaagtccatgaacttttgcccaccaagatcactaccaaagccggcctcagttaatacatagtcgcttaaatgcaaagccaagtttgtcgcaatgacggaattggctccatgcgcgatattagcaaaaggccccccgtgcactaatgctggtgtgtgttccaaggtctgtactaagttaggcttcagcgcattagacaatagtgcagcaattgcaccttggaatcctaactgtttaacataaaccggttcatcatccttagtgtaaccaactagcatgtcaccgattctactctttaaatcgttaatatcagttgccaagcagagaatcgccatcaattcgttggctacagtaatggcaaaactagcttgatgttcaacaccattaaacttggagccttgaccaaccgtgatttttcttaaagcacggtcattaacatcaagcccacgcttaagtaaaattcggtcaggatcaagatttaggctattgtcttggtagatgtagttatcaactaaagctgcaagtgtgtcaattgcggcagttaaagcatgcatatctcctgtgaagtgtaggttgatatcttccatagggatgatttgtgctttcccaccacctgtagcaccgccttttaatccaaaaacaggtcccatcgaaggttcacgcaaggcgatcatcgtattctggtgcaactgattgtgaattgcatcccccaagccaattgtaatcgttgacttaccttccccagcgggagtaggagaaattgacgttactaatactaatttacctaactttttactagcacgagtcctgttaatggcttgccaagtaatcttagccttatcatgaccataaggttctaagtcttcctctttcaagcctaccttagcggctatttcattaataggtaattctttggtttcttgtgcgatttcaatatctgatttcattattgcttattcttctttctagacatcattaaaacagaatagctttggtaatcactttttagttgataaacttgaaaattacgccaacttgaaagcaaagtcatttgattgatttttacttttgaacgatatggcaacttgagtaatattttgtctccacccttttgcaagtaagaaaaggaccaagtataaactgctaaaagtaagaaaatgataccaactactattccaggtatactaattgctttgttcccttcatagcccaaaataaaggcgataaatagaacgattaagagccaagaataatagataattcctgcaactcctagaaacatgaaatgccgtttagattttagaatttagatcacaccctatttatttaatcatgtctattgtatcaaagatttaatcaaaataagagggttgaacttacagcaattaaatataagtccaatcctctatcacatttatttactttactactgctatttcgtctctaacctttatattgcttgaatcgatgccaggtttttgaccgtgaagattaaagtctaaatcaactgtcggttgaaacagtaaatgtactcattgaaagctcagtagccttggtatttttcgctgcttgaccccatgctctcaatactgcttcgggaattcctttagcattagtcaaatttacgttacttaatttattaccaacatggccgaaggaatcaccattatcaccaatattattaccaaagtttacattgcttaggtcaatattggataaattactatcgccatcgaacaaactagcaatcggagactgtaaaatagtttgtgtaaggatgaataattccttaaatttatttcttaaaacattagaaaaaggagttcctttctcgtatgattggtttgaacaaaaaaacacatacagaaagaagaactccttcatgaatgattttacaaaaaatatagcacaagctctattcaatcaagacaaaataaacgatttattgcgcaaagagctacaacaggctgttaataacttgctagaagctgaattgactgcctttctgggctatgatccctatgccagaaatggctggaatactggcaattctagaaatggtgcttatttccgcaaggttgatacccagtttggaccaattgaagtgcaagtgcctcgagatcgcaacggccagtttcatcagcacacgctgcctgactacaagcagcactctgatgttttggaaagcacgattatcaagctctactccaaaggcgtaactaccagagaaatcgctgacttgattgagaaaatgtatggcagtcattatagtccagcccaagtatcaaatatttccaagcagatgctccccaaggttgaggcttatcacaagcgcaagctaagcgacaagtttttctgtgtctatttggatgcgacataccttcctttgcgccgagaaacgtttgagcgtgaagcagtctatattgccattggcattaaacctaatggacataaagaagtcattgactactgcattgcgcctagtgagaacattgaagtctggacagagatgcttcaaaacatgaagtccagaggcttgaagcaagttgaactctttctttctgatggtgttgttggcatgaaaacagccttggccaggacttatcctaaagctcattttcaacgctgcctggttcatgtcatgcgcaatatctgtgctaaagtccgggtggatgaccgcgaaaagatcatgaacgaattcaagcagatacatcaacagacaagcaaaaaagaagctgcagctgtcttgcacaaattctatgccagatggaataaagcttatagcaatgtcatcaaaggtttgaaggaaattgagcccgatctgctggtcttctacaattatcccaaacaaatcagagcttcaatttattcaaccaatatgattgaatcctttaacaacgtcatcaagcgtaaagctaagcctaaggcagaatttccaactgaacagtcgcttgatgcatttattggcatccaggcaatgagctacaatgaccgctatttcaaccgaattcataaaggctttggtcaggttcaggataccttagaatcctattttgattaaataaatgattaaaaaatcaatttacgagaaagaactatttacacaaaagatttgacagtttcagcaatcgatttagcattagataaattccaaccactaatatttacagattcaagacttttatcatgaccaaatgttgcataaatattagtaacacgacttgtatcccaaccacttaagttaatactttttacatttggaatactagaaaataaaagtttcagattagttacattggaattcaaagttgtagtagttaaatcaatggcagttgcatttggttctttattgcttgaacgtatccattaactatttctctagtaatgttgcgggcatttgttagatcaacatcagttaaggcattattatgtgcaaaaaagttccaagcgtttaccacatttttgtatacagtatcgcttagatcaactttcacaagcttttcagcgccactaaacatttgtgacacgtcactgaattgacccatattccagccagcgatgtttacattttcaagattcttgtcattttgaaacatagatctaattgcagtggcttcactaacatctaaatgacttagatcagcagactttaaagtgtcactgttcattaaggctgcggtcatgtcacccttagcataaactttgttcttatctccctcactgtcaatagtaatgttaactgcacctgcatctttgatagtttctaataagtctttagtgatatagactttatcatcagtagttattgttcctgcattgataaaatcttgggtattagggatgtaaatatttttattaccagtacccttatatttagttaaagtgtattgatgagaattttgatctaaacttccatcccaatctgcagtgttgtactgactattttgagtggtgttagcttgtgtcttactagttgaagctactgtagtagcttgcttattggtagaagtcgtactctcctgcttgttttcattagtagctatcttgttcttactttcaattgatgatccgacatttgagttatcatcgattgaattgttcttagtagttaaatcagtatttgaaagatcaactttgttagtcgattttgtcttcacaatactagtagtgtcttcagttttattggcaccatttgtatctacattattagaagttttagttgtggaagcaacttgctctgtagtagtttggtcctttataacactggtagtagcactatcagatgaatttgcatcaacactatcagcatgtactgtttgactagagtaactcataaaagtcaatccaattagtacagaaactgcaccgattgttattttacgaattgaaaaacgttgtttaatagaatcaatattattgtttctaaggaaatatcattaataaaaaatgaccgagaaattaatctcagtcatcttcttatcaataagggtatctcatttctactaccctactcgactagtaccattagcataattcaaagttacgccatcttgcacgttgaaaatgtaaatattgaaatgaactgcatttgagttaaccgactgcccttccatttcaactccgcgagccaatagttcattgccacgaaagaccggtgtcacacggtagcggacgtagttgcttcgactttcttttacataatcagcaacctgatcctcatagcgcaacatatcaggatcatttagctgccttgtacctgtcatcaaatttttaatgttgttgttctgtcctgttagctgataaccaatcaaatggcagcgattatagagccagccgccagcaactcgtttattatgccaaccagtaggatcaacatgtagtggttcgcgtctagcgcttggcatcagcgactgaataagcaatgcgtttgcggcagttacccgattcaaaccatcgaggttaccatattcttgccatgctccgcgattagtactcaagtcactcttagaaaaactaggatcgttgttatttactgtaatgatgtttttcccagaatagttaagacttgccagttttgcggcactaacagattcaatattgtgtttgccagtgtacttcttgagttctttgcgcagtttagcaatctttttgtctaggctaacaattttcttttcagtttgcttgttttcctgcgcaatttgcttggtctttttctcagcactgtggtcatatttgatgatagttttaaccttggcgatgacattttgacttagactaggattagtaatcgcaccatagccgccaaacaaaaacaacgtacttgaaacaagtgtaataattttcttcttattcatcacctttttgcctttctgtaaccagcattgattgcatcctgctcactattgaagtaaaccgcatttgcggaattcatatgatagcctgcttgtcctggtacgtgataaatcttagaattgacgttaccgacaattttgccagtttctgctgtatctaggtctccatgattgccgccaccattagaatgatgtgttgcagttgaacgactagattgagctgactcgttttgccgtgattgttttgctatttgagtagcttttttagcagctgcttttgcctgttctttttgctccttctcttgttcttcttttttatccttagcatctttaagttcggagcttagcttatcgtactcatccttcttcttcttttcttcggctaattcaaaagtctgctcttctaagacttcttcatcagtagtgcttttctcttgaaacttcttctggtgctcaatatatgctggttgagaatgtactaattcacgagtgatgtttagaccatatttatttaatagcagtttttcagtatcactaattttataaatacttcttcttggtgagattagtaaaccagctaattttaaatcactaagcgcccaagctactcgactaattgctactaaatcatgatatttagaaggatatcttaaattaacaagttcttcaggtaaattaatctctgtgacaacagcttatcaagctctctacctacccattcttctttagtactcgctacctctagcatgggacctaaaaatgcatcccaagttggcatcccattttcactatgttttaaagttttgtagtcaatcattttttatctttatcaacttaggcgtattactgtaatgtgttcgcccagaagcttttatattaagattgactggttgcatcaaatttacgctagtcaatattgcctctcctgactttaaactcgacaactgagctaatttgtctttatttaggaaattattgattgctttaatttcatattcaccagttaaccgatgcattaaaagtgttcctatctgatttaatactatagttggcacatctttggggctttgagtagttaaaaatagaaatattccattttttcttccttctcgtgctaacgtagccagaggagaaataaaatcatcttgagcatctttttctaaagcatatctgtgaacttcatcaacaaataataaagttggatgttttgtcatatcatgatttaataagaaattacttatatagtctacaattacttgtcctaatccaattgaaaatttggaatcatttaaacgtatatataatgatatgtcattaccttgaaattctaacatttctttattaaggtctttgagtatctttttacctttatctgtttctccaaaatccttatcttgagttttactatctacgtttaaaaataactcttttagattatacgtcttaatcaaatattttactttacgtattagccaagaattagctccatatgtaaaataatcaaactggtaggttccttgttttatacctttattccaactaagttttaaagaatctttctcaatttgtttatctaaattgtttatatcaaatgattcattaaaaactttatcagattcccactgaatctgaagatgcttgtactgttcttgatttgccccttcacagtcaagaatatcatttcttataaatctattctctgcctcggttaaatttaccttatttaaatgctttttatagtattgaacaaattttaatttttttattgcctctaaaagctcaatcacttgggaattatcatttggcctaaataaagaaatccattgttcatcagtcaaattagcagtattcaagaataaatttttccctattgtttttaaattaacctcattttttgaaaatgcatctttatattcaccagttggatctataatcaaaaattttccttttagcttttgatatttatctaaaatcgctaatgcactagttgatttaccagaattcgttgctcctacaatcataaaatggtgattaaataatccatcaacactaattttgaatggaatagctttcttttcatttaaattaaagcttgaaaattcaatttgattatcccttttattaatttctaatgaatttatatatttcttaatagcttcatcattacagatatatgccttatcaccaattcctactgttagatctccgggcaatacaaacgtatttttatcgtacattgccattagtttaatttcaatatttgggtaaataatatcatcattattttctattactgccttatgaatattatcagtattattaatcctagaacttattactttccctaagaaaattggagactgtaaaatagtttgtgtaaggatgaatgattccttaaatttatttctttaaacattagaaaaaggagttcctttctcgtatgattggtttgaacaaaaaaacacatacagaaagaagaactccttcatgaatgattttaccaaagattttgctcaagctctattcaatccagacaaaataaatgatttattgcgcaaagagctacaacaggctgttaataacttgttagaagctgaattgactgcctttctgggctatgatccctatgccagaaatggctgaaatactggcaactctagaaatggtgcttatttccgcaaagttgatacgcaatttggcccaattgaagtgcaagtgcctcgggatcgcaacggtcaatttcatcagcacacgctgcctgactacaagcagcactcggatatcttggaaagcatgattatcaagctttactccaagggcgtgaccaccagggaaatagccgatctaattgaaaagatgtatggcagccattacagtccagctcaggtatcaaatatttccaagcagatgattccaaaggttgaggcttaccacaaacgcaagctaagcgacaagtttttctgcgtctatttggatgcgacataccttcctttgcgccgagaaacatttgagcgtgaagcagtctatattgccattggcatcaagcctaatgggcacaaggaggtcattgactactgcattgcacctagcgagaacattgaagtctggacagatatgcttcaaaacatgaaatcccgaggcttaaagcaagttgagctttttctttctgatggtgttgttggcatgaaaacagccttggccaggacttatcctaaagctcattttcaacgctgtttggttcatgtcatgcgcaatatctgcgctaaagtacgcgtcgacgatcgtgaaaagatcatgaacgaattcaaacaggtgcatcaacagacaaacaaagaagaagccacagctgtcctgcatgacttctataccaaatggggcaaggtttacagccatgttatcagaagcttgaaagacatagaaccagatctgctggtcttttataactatcccaagcagatcagagcttcaatttattcgactaacatgattgaatcatttaacaatgtgatcaagcgcaaagctaagcctaaggcagagtttccaactgaacagtcgcttgatgcttttattggcattcaggcaatgagctacaatgaccgttatttcaatcgaattcataaaggctttggtcaggttcaggacaccttagaatcctactttgattaaataaataattaaaaaatcaatttacgagaaagaactatttacacaaaagatttgacagtttcgaaaattgtgccattactatcaatcaaaacatgataattaatagtattagggcgtaaaacatcactttgattgaagcgatacttcaataaactcatgttttctatttgaatattagcaaaaatagaagatacagtagatattttacctaaatagtattcacatttgtctacatgcaaatttttgtctgaactatcaaaaaagttatctatcaaactcatagttatcccacataataagataaatcataattataactacacattgttgctttaagaaaagcaatattatatcctcgatctctcaaatcatctaaatcactccagttgtcattaacatcttcttgttctgtttttttatcaaaattatgaatattataatcagtaatcaaacaatctaaacttgagttatgcttaattgcgtttataatcattctacttatgtgattatcaccaaaactaaaacccgaagtaactaataatgtattaggttggtgcaacttattttgaaatcgagacatgagatcaaaatagggttcctcatagctctgagcatatttattagaacttggaaaaatcatttttacatgattactgttatctctaatcgtactttttacctcttccacagtcgatttagtaactttattttctttttcaatccaattaatagacccatgaattttaagaagatctataacatgctttttatagataacttgtttagtattaatattgttaacttctttactcaaaacccactcatacatatcatcattgaattctttattatttccaaattcaaatccatcaaatattgtgaagttatctttttccagagatttttcaattgctaaatcataatttgtagtcgcaaccatcaatttactgctatccgaatgaattaaattaagcaactttaaaatcactttatcatgcttaaatggcattttagatgtactatcgaaattataatcaactgaatcaagtattgatagtaaaataaatctttttaatttttttgcttgtgataaacttggatttctgacttttttaccagacatctctgcgtcttgaatatataaatttaaatttgaaatatattcttctaatggaaaagaaaaccatgtactttcatcatcaaaattaactttttcaaatttttcttgttgatctttaggtaaaaagatcttagcatccttttcatctaaatattcttctaaattatttgttccataaagctgattgaaaatattccatgaaatatcttgcatagtctttccataatttgaattaatatttccattctcattagttacaactgaagctccggcaccaactaatagcacaacattactataatctttacttataaaacgcaaaacagcccttttgagaaacttatgaagttgcttttctaaaaacacaaaatcatgatcattatcatcatctggatttattttatctctataaaatttacttagtgctttctttttatcttgtttattatatttatcaggtaacgataactctatatctatttctttatctctgtacaactgcatacttaatctcctcgtattatataaattcatctcttaaaagttaattctaatatataaacaaattgtcaattttatcaacaattctattctgctccgctaatggtggaagaggtaatttcaaattaattaatttactcaaatatattcctttttgggttgtccctttcgcattagcaaaaatttgagttttaaacattgctgaaattaaaacataataaagaaacttacttaaaatattactactaataaccgcaacacttctttgagctgtaaaaagtttatcagtatcaacaactgcagcattacctaacgagcctacaatagtgagtaatacatctccctttcggatgtttgttcttttatcctcttttaaaaattgatcttcagaaacaaatctatttgataaagaaaaatctatttttccttttttaatgtttattgcagagataacttgttttccttcatgtgaattcggtgggggattatgcgtaccatcagtaatcctttttgcaatattccccaatctaacccattcccaactatcaggaatatcaaacggcttttcctcatcagtgatcggaggcaacggcttgctcttcttgatctccttttccttgatcatcttccgcttctcagccttaatcttctctagcaaaacactagctggttcatcatggggatcttgctcgactaattttccacgcattgccaaatccagcaccttcgacttcagcaaagtctgaagttttgcgtattgttgagtagaagattcgactttgcgaagcaaagcgaatagctgcgctattttagcagcgattcgactttgctcttcaagtggtggaagtggaacaagagtttctttcaacttttttgaattaattgttggtacagcagatccttttacaaagtcttttatgtccaagcttaaaaacagatagaatatgaacttgtgatttaagtcattgtatggtattaatcccccagtattaagatcaaccaatgaatcttgagacaaaattcttttttttgcggttaatatagctccaccgtttttaggaaaaataattgtatttttaggcattacttgtcggctatatttttctccaacccaatttttcacgttttccatatataagttattattattcatatctttaaccttaaagtatggataaatattatcactacttgtgtcttctttcttgggagtttttccattttttagtaaacctacatcccccaatctaacccattcccaactatcaggaatatcaaaaggcttctcatcatcagtaatcggagcaagcggcttacttttcttaattttcttttccttaatcaactgctctttttcagctttaatcttctcaagcaatacactagctggttcatcattaggatcttgtggcaccagctttccgtgcatggccaaatccaagattttttctcttaaagcctgtgcatcaaaatctaaagtattagtcttcatcgtcaattccttctaacgccttattaagttccgcaattgcatccctaattgccttagacttgtcattcatctcatctaagatttctttcaacgaacggttatcgtgctcttcttcatcattcatccaagaaatatcaaggctagtattaggacgcttcaaaatttcatcaatcgtaaacttgcgccatctaccgttagaattcttctctttatcccaagtttcttttctctttgagcgatcgtcaacgcagaatagtttttcaaattccgcaaaatccttgtcacttaatggattacgcttaccaaatgaccgcatctgatgacgcatatcataaatccaagtttccttggtattatccttgtcactttcaccgcgagtaaagaataatacattggtctgcacaccttgagcgtagaaaatcccagtaggcaatctcaagatagtgtgcaagttgcacttgttgagcaagtcttttctaattgcttcgccaacaccatcggcaaacaatacattatctggcacaactacggctgctctagctttaccattgtgtttaagtgaattgtagataatctgcaggaagttcaattgtttattactagtcttataagttaggtcgtcacgacttacactgtcgtcactacccttcttggtaccaaatggcggattagttaaaactacatcaaaatctttcatccatttaccatttgaagataatgaatcccctagttccaatcgtccatccatgccatgaagatactcattcatcatggctaaacggtgcgtggtttcaactaattccataccagaaaaagcttcttttacttgaaattcttctttatctgcggacaaggttgaataatcatctgtttgatcttttaaatatctgtcagctgctaccataaagccaaaagtaccagcagcagggtcattacagcgatctccaattttaggctgagtcattctaaccatcatgttaatcaacacacgtggggtaaaatactgacctgctccagatttgacttcgctggcgtttttctccattagaccttcatacaaatcaccaaggccttcgtcacgagctgaccaccaatcaagtgcgtcaatatcttttattattttttccaggtcagcaggtttgtgaattgaagtagaagcatcagcgtaaattgaattgattcttggactattaaccacttcaggattacctaaatcaagtaataattggcgataaaagttacttaactctagtccttcctttgaaacaagattatcccattgatatttttgggggatatcatcctgttcaccttgttccttactcatttttaagaataagatataagttaattcagtaatgtaatcttggtaactgacaccatcatcacgcaaaatattacattcattccataacttttgaacgatttcttgattgttcacttaattttgctcctttaaaaattgtctcttttgaagatttccggtagatatatttgaatattagtaaatggatcatcattaatccagtcactctttttccgatacaacttattggcgtgatctactgcatcttgcactttatcaaaaatatattctcgataactattacctttaaagcgactataatcttgattaaaataggcagatctagacagtttctgtactagctcttttctagtataagaacgagtgacactttcaaaatgcattaaaatccaaatttcaaagtctattgaagaaaacataatagtaatatcattttttcgagcaagtttagcgcatttccttaattcatctttagaatgctcatctctatcgaaaacaacataagttttatctaaatgattatatttgccaaacttaactgctttttctactagacttttaccagacaaatctgcagcaactattttaactttaatatttgctaaacgatatttctgcttaagcatagtaaaatattgtttttcagattcaccttcacacagaattccaataattggattagacttagtcttatttcttattctttccatgctcatccccatatttttcatgaatcatttgcaatacatctagcaaaccatctacatctattacaggaactgcaccgaatcggccttgtaagtatctcttagcaaacgaaatatcatgtcgacctttattacgtgcatcttcaaagtcaaagattgatttcaaatcactaattccgtgaaaatccttgtctaataaataaatttgatcaattcttaaatcgctgtctaatagctgaatatcatgagtagtgataataaactgattcaaattttctgttgaattaaaaatacgaactaaagcagctgcaagttcaacatgcagtgaatcatcaaattcatcgattacaatcgtcttctcgttaccattcatttgagcaagcatcattgctaatactatataaaataaacgacgtgtaccaacagactcttgtgttaatggaagttccccagaattaataacttcattttgatgataaatcttgtgaaccgtatatagttctttagttgttttaggataatcaatatttaaattctctacaatcttttgtaattgtggattcaacggattagtaggtacttctctaattctaatatcagagatattaaaatccgcaaaacttaagaatgagatcatttcttttttgaggtattcatcttccatcaaatttaaaagttcgtcaggaatatttactggatagccgctgccaataaaaatcagatcattaacaaaccacttatagatagcaatacaatctgcatcattttcagattgtgctaaatataggaataaagaattatctctaagcttaggaatgctgtcttccaaaagcttgttagagacttgaatgtcatttccatttcgagaaaaaatttctttttccttgttaccactaattaaggttaatgcttcactggtaatgctctctcgattgtaactaaatgaatagtcataaattttgttttttaactcaagcttcacttcaaagtaagtatcttcaatcttggacttttcatcaaacaaaaaaggataataatttaacttatcagttacggcttgagttggacgtgttactattccttccattgtttgtaaagcttgaatcaattgagacttacctgaaccgtttggaccaaataacagtaagctttttaataatgatggatttttacttgagaaagtattagtttctttcaatttacgtagtctattgcctgtctctgcagacaaggtagtgcgctctctaaaagaagcataatttttaacagtgaactcgattaacatattgtattcctccgtgttaatttaagtttagcacacgcctttttttatcacaacttttcgtgattaaaagcaaaaaataccagtaatggcatttttaaacatataaattctcattcaacacgtaaataatctgatcagcattttctggaaagatcttcttaatttgcttataacccccgtgacgtttaaagaaatagttatcatcaaaggctttctcagcatttggccccaatacagtagatgaaattaattggttctcaattctcttcaaccatttcttttgaggaatagtccaatcagctaaaccataaactttttgcatggcattatgaattctaacatcatgatccaccaactcagatccagccgcagcttgtctaatgaagctaataatatcggcagtggtctgaacatggttaacgtttttccatgcactttgcaaatcattttctttaaagccattttgctctagcttaagtttaatatttttgagttcatcaaaagttaaatccttcggtctagtagctacaacttgtaaggctggaatagtattgacgttttccttaacgaatttattgaagttttcaatataatccgctggtttttgattgccatgcccataacctcgacttacattaattactttgtctactgcgtctgatattatttgcttgggtttgacaggtttgatgtgatctaactgctcaaacttaggccattgctttaaaaattgggacttatctaacttacttaattcacgggcccattgatcaaccgaattaatctcagctagatgttggaactcatcacgtttagtatcatccaaacgtttaatttttctctcaacggcaccagccatatctacttgatactgagcggaatcctcatttgtctcaaagaaatcatccttgtgatttaagaagtagtgaacattatgtcctggatttttaacaacaggcttcatgtttgtcactttattcattgcttcatagattccgacggcatcataaatcgtaaatttggatttattaatttcgggacaaagtctggttgcccgtcccaacatttgctcatagaggattcttgactgaactcttcttaagaagacaatactagtaatttgcggtacatcaattcccgtagttagtaaatctacagttactgcaatattggggttggtttcattcttaaagtttttaatttcttgattaggatgccgaattgaaccagtaattttttcgatagcatcgtcatctacaggattactcacttttttgaatgcttttttcaataagtcaacaaccatatcagcgtgttcatcagttgccgcaaagattaaagttttacctaaatttggatcatttggatcaagatatctttgagctaattcatcacaaactacttcattaaagctacgtgtgataactctcttattaaagtcttttacatcaaaattcatattatcaggtaatttttctttattgatagttttttcatcctgatcaaaaagactaacttcggcaccctttttaaaatgaatcccttcttgagacaattgagtttgaataattactggtgcatcatgatccactaaccagccatcgaggacagcttgttggtagctatacgaatacaccggtttgccaaaaatatcaatcgtttgtaaagctggcgtagcagtcattccaatagcagtcgcatcaaaataatcaactacacgtctatattgactaacataatcttcttgactatagaattgatattctttatcgctgagctctttatcttctgcataaccacggtgggcttcatcaacaataatgaaatcatattgaccaacggatggcttatcatcactgtcttcactgaaaaataggcgtttgatcatcccctgaaccgttgcaatttgaatttttgttgatatttcaggtgccttatcactcaattcctttaatccataaatggaagaaattgacatcgtacctattttattatctttaattgcattggcagtctgctttcccaatgaattacggtcaactaggtaaagaatacgtctagctctcttatgcttaagtagtctgtacatcaaagcaattgccgttctagttttaccagtacctgttgccatggcaagcagaatacgcttttttccatctttgatggcattttccatcgcttgaattgcagcaatttgatattcacgatgtgcaaaatcaggaaaatcttgatcatctaccaagtcttgatttgcttcttctttatttttagcagaaagcttcaacgataaatcttctggcttatgaaattcctctagagcatatgcgctttctttatgattacgtgcatcccagaaccaaataccagatttttcctgatattgtttaagatatggacgaccatttgcagtatagatgaatggaactttgtaatcacccatttcatttgaaactagacgataatctgatctaaacggtacctctttagaatattccttaggctgtgccatttgccctacaatatcttggtcccactttttggcctcaacaattccgtagaactccaaacctttgaataatgcataatctgctcgctgaccattaggtagaacccattcagcaattgccatattgtgacctttttgcggttcagttttctgcgtccaattgttcaatttttgtgaatctacttcccagcccgcatctcgcaattgttgatcaattaactgacgtgtttctgcttcagttaactcatgttttttagcaaattgaacgttaatctggcgtctgcgttcacgctcttcaggagaaattatgacttcctgcaccctattttgttgtaattgctttatcttttcttcgagagctttgattttatcttcttgagttttaattaaagctttttgatcttgtggctcaacataatctgcaactttatccagagaataaacttctaaaaaccatttccataccaaataagcactctgatcaatttcaagcgcaatctttttggtagcaataaaatgatcgtcatgcgttgccttgttccgtcttaacctgatcaaattaagagcattcaaaacagtaggtggatattcattcttagaatatgccattttttcaattcgttgtttttggtttaattcccaatcacctaaatcatccaaatgcatgatttctttagttaattgctcaccgaaagtaccaaaaactgtcaaactacttctaggatcagagtaaattaagctttcagcgctggaagccaattttgcgtattcttgataatctttttgtgaagtttcaaagttagacattgtttttcctctaatattaaagtaaatatagttttattctacctcgaagccccatttaataacaagtagtgtaggtacaaaaaaagaagcaccaacacagtgcttcttttaacataaactaaataatcaatcgaaccctacttcgccaaaacatattcaaatcccaacatattggtatagcgattactacctatcttaatgtaatcatagcctttgatcctcttggtgccataagtttggacataattctttgtcctggtattctttgacttgatttcggcaacttttttaccctgggcatttaccacaggtgttacagtttgcacagtgtagtaatgtttgaccacttttagcttagatgcttcgaaattaccatacttaacatatttatttacatcaattttgacatttttttgccctttaatagtcataattgcttgaattttgtaaggggtccccttcttcagtaactttttcgtctttatacctttagcagtataaacgtatgcattactttgcaatttctttttcttgccaacagtaatgccatcagtgattaatgggctaatatcgactttgcgctttctaatggtatctgaagaatagccaaaccaaaatggactcttcttggtaacatcccatactggacgagttgttggatattgccaattacgtttgctgttataaagttgaacgtcaagctcacctgtaacttgaggctggtaatagttgtagatcaggttcatcactttttgaacctcataagtagttaactgatcagttcgtctaacgagcaactttttaccatcaagtgctttagtcgtattagttaaaaacttgtcagcttgactaaccgcaacttcactggcatttgtctcaccaacaacagttttagcattttgcaaataagtcaagaactgtatctttttatcatagtcagctaatttatagcgatcagtcttttgaaccttttctgcagtggcaattgcagtagacaatgatgacttattagttgccaccttgctttgtgattctgcttcaccggctgtgttgattggcgtaagttttactccctcaacctttttgacattactagccaagatatagccttcattatctaacttattagttttagcattagcttcacctgttgtatggtagaaaagttcagctttcttttcacttggtacccaaagatagagtgcttcattaattttgtggttgctatacattgcagtttcttcaaccgtattggtatagaactgtttagatagctcttgacttgtcttttcaccgtcaacattgtacaaaagaatctttttatccaagacaactttggtagaatcggccaattcaagatctgaatgattctctaaagcttgtggcaaattcagatcatcttctgatacccaataattagtgcccttgatccggtagtatgaatagtgatcatgatcaaagtctgtcaattgttgtgggaattgtcccgcataatcaactgtgatcttttgtcctttcttcaattcaatattatttggatctgtaccccaacctgttgaattaacatactttgtaatggttgaagtattcttattgaccgttacggtaattggtgcatgagtagtaagacgatagccgtcaatgtaaccgatgttggccaccttgatataacgaccggaacctaaataatagtagtcttttccattaattatggtataaggaatgcgatacttacctttttgagcctcataataatactttgctttactactagtagttttccgcttaccagcatatttgactacgctaccctttttgacaaaaccaacttttttgccagacttattgtaaatattggcattaaaaattgccgttaaataagcagggccagatattggcgttacataatctgaagaaatataaacattcttgcgtaaaggatagtataactcaccagcactgtagtcgcctggatcaaccgtcttaaaaaatggttttccatagtatttaatcgtgctgcctttcttaggtgcagaaatatgatccaaataattgcccgagcgattgtacaacataatatgtgaatcaatgacttttaaggaaccagttgcattgcttttagtagctgcggcaactgatgtttgaacgtttgaagttagtggtgctgcggcaattggagacacagccaataacgcagtagaaattaagataagttttttattgattttcataatgaaccttcgatctaataaatgcagttaagatttgatcagttagtactcatatcatcattatagcagttatagttatttattccttgatattgagcctatcaaaaaagagatcgaaacccagtgtctcaatctctttcgattttattttgttttcttcttacgagtccataatccacttaaactcaagccagacagtaataaccctaaccatgaaagatcactatcttgcctaccggttgctggtaaaacagacttagaggccgatctcggcgtaatttgttctactgtatcgtttttcataatagaagtttccgttttacagcaactaatctcactaccacttaagcttcagtttatggctactttgctctacctgtaaaaatgaatcaacgtagcgcttaaaaccaggtaaatatttggcaatcaaatgatattctcgtgaattaacaatttctttcttttgggctgcagaataattactttcacctacaaaaaagttccaattcaattgatctataaattttatgaccacgttagcatcatttttatctgataaagcttgcgcaatctgatttagttgcttttcatccaaactaaaaaacaaatgcttcaaatattgcgaaaaatctgttggcactttttgcttttcttccgcagttaaccacgattccattttgaaggaatgcacctgatattgcatccccgcttcgtctaaatatagctgaccatattcctgcttagtcatacaaaaacaagctcctgctacctccgcaattggtcgattagcaaacggaccaataatattctgtgcgtgcatatggccagaaaagactgcttttacattatatttttgtaataaaccttgcagtgcaagtgcattatcaagaatatatccctgatagattactttattatggcgatacagattatgatgcataaagaatagcacttgttgctgcttttgctgcgcatcaattaattctttttcaatccagttcatttgagattctgaaattcgaccgttagtaatcagatgagtttgtgattcctgcttgccataaatatttgagtcagccaatattagtcgatactgcttattcagattaacgctataagccagtgaatcaggatcttcatgtaaagcataatgataagaatcagcaaagatctctttccaaatagctgggctaatttgcggggtgtaatcttcatgatcacctttaaacttgcgagcccagccgtcaaaaatatcatgatttcctggtaaaactaagaatgcaattttatttttagttaatggcttaaaaatattagctaaacgttctcctgatattttagcgccattaaaggttacatcaccagtaattatcactgcagtgggcttctcttggattactttacgtacaaacgcggtcaaagcaatctcctgataatctaagtctttacctgcactagtgttgcgcatatgctgaaaagcaagaccatcatcatgtaaactatctgcaattagatgtgtatctgataataaccaaagaattggcttctttttactagtaatcacaatttacctttttcaaaaatctattttcactttaactactcatcattataccaacaaaaaaggcatccctgctagggatgcctcattgcgataaaatattgaattaagcgtcgatttcttcgatcttaatgttaactacgaatgcttcaggagtatcagtgcctgaaacgatcttcttagcgtaatcgtcgccttcatgaatttcagcatgtcctaaaacacgaaatgccttatgagtaggaacatcagcgacaacaatagctgctactgaaccattcttcaagtttgcataagcagttgacttagtcttttcaagatattgaatagttgaagcatcaattgccttaagtgaagccttaggaccaacttgtggcacaccgttagcattcacagttgccatgtatggtaagtgtgagttaaaaaattcaatttgttcatcagtaagcttagtagtatctaattttttcataaaattcgacctttcttttcttaagttcattattaattataagatatttgctataaaatagctattattttgccttagcttaattgattcttacatttatcatacacaagatattgtatttaataaaatgtgtttttaattaaatttctcttgctactaatatttttattaagtaaacagtcgttgatatatcaatgcttataaatgctggcaaaaagtcaaggattgaattttattttttagccagtagtatattatcttgcattagttaataagtgatacaagatattgtgcttattaaaataaaaatatattttaaatttcatttttattaatgttatttttagtgaggagaattcgatgacaaagaaaggcttaacaaaatatttatcaattggtgcagtaactactgcagcattatttttagcagcttgttcaaatcaaaagagcactacatctgctaaaaatagtaagacagaaattactatgtggcacgcaatgaatggtgcacaacaaaaaactttgaaacaattgactaataaatttgaaaaagaaaatcctaacatcaaagttaagctagaaaatcaaggtaattaccctcagttacaagggaaaattacttctactcaacaaaatcctaataacttaccaacaatgactcaagcttatcctggttggctttatcaagctgcgcaaaataagatgttggtcaatttgactccatacattaataattcaacttatggttggggctcagtagccaaatctaatattcgtcctgaattaatgaagggtgcgcaaattaatggcgttcaatatggtattcccttcaacaaatctattgaagtcttgacttataacaagaccttacttaagaaatatggtttaaaggtacctaaaacaatggcagaacttaagtctgtttctaaagcaatttatgaaaagtccaaccataaaattgttggtgctggttttgataacttagccaactactatgttctaggtctcaagaatgaaggacaaacttttggtcgttcaatcaagttagattcggctgcctctaagaaaattattaacttctacgcagatggcgtacgcaatggctactttagaactgctggtagtgaacgttacctctccggtcctttttctaatgaaaaagtcgcaatgtacatcggtacttcagctggtgaaagctacactaagatgggtgtaggcaacaagtttacgtacggcgttgctcctcgtcccggtgaatacactatttctcaagggactgatctttatgtctttaaccatgcttcaaaagcacaaaaaaatgctgccatgaaatatatgaagtttttgactagcaaatctagccaattaacttgggctaatgagactggctatattcctgttaacgataatgtcttaaatagtaaggaatacttagacagcaagatgaaattgccaagtgtcttaaaggattcaatgaagcatctctacagtgttcctgtagctaagaattctgactctgcttataatggtatgaatcaaattatggaaaatattttaattgctgcaaataagcatcaaaatgttaatgctcaaattaaggctggtcaacaaaaattagatagcgcttggcgtcaataatgatattaaaaaagcatccctcttctctattttgattagggatgcttttttgcatttgcaagagttgaatttaatttaagcactcacatagagtgcgacgtgcaaagaacctacttttgactggggcaaatgtatttcatccaatcctaaatatttggcttcatcaactattatactatgtcaaaagtatataaagaagagttaacacataaaatacaaaacaaaatcagtgcgaaactccctcatttttatgttcacatagggttcgcactgatttttttcttaactcaaatctttcttagtaactgccaaatgtgccttatcattgataaagacccagattggcaaatctattcctgttgaatcagtcaaattatttacaatttcactgataaaaagctggaccattttcttaggcggttcagtaaagtctcttctttgcggcgtgtaccataaacctgtgattggctttttagtttgtcgatcgaaaatacaattcagggtttcatcatattgatcaaatgaggccttgtagactatatgtaatggatgatgtgccaagttctcgactaactgataacgcatatcgtccgcaatttttcctttactaatcatcattaaactggtaactggaccattttctttttcaaatttttgcaacttgccttgtttgattagcttcttttcaactgaaataaaactatcagaatcaactaacatcgtttttccttctcgtattatataaattaaatcagtgataatgattattcttttagtttgtttattcgatcatcagatgctagtctctaattgtcattgaccttggtcaattggtataggttgtttccttctgtagctttgactacttttttagtctgccgcccaagcagttttactaatgacttactcacatgctgtatcgattctggctattactgattcagagcagattcagtcgcagctttttagcttgaacctatgaatacttatattttgcgagattgtcttagaatctgtaattagggactaacatgtgatgatcgatctatgaccaaatatttgctagaaaggaggccattctcaatgaaactttttatcggaattgacgttagttcaaaagatcttcaagtcgctattactgactcagaaaattatcaaaaacctttacttaaccaatctttttctaatgacctgattggtgctaatgaggtcaaaaagataattcttcaacttgctaaacagaacagctatgacaaagtaattatcggcatggaagccacttcaatctatagctttcaccctgcttatttctttgccaatgacgaagatttacaaaaaattaatcttgaaactgatgtcattaatcctaaaaacactaaacgatttcatgacgtttacgaagaaaataagaatgatcctactgatgcctattacatcgctgaatacttacgctttggtaaataccatgtcactattgctcggcaagaggaatacttagctttacagcgtttaactagagctagatatgaaatcacatcttcgctcactagagctaagcagcacttcattgaaactctttattatcgtgtaaacaaactagttaccgttgacaaagacaatattaaaacttctatctttggcgcaacgatgctgtcaattgttactgatagtaaaaccatcgatgaaatcgctgaaatgccaatcgaggatctaattgactaccttcaaaccaaaggacgtggccgcttctctgatccagagactttagctaaagcgatcagaaaagccgttagaggatcatatcgcttaggtaaagtcatgaaagactcgattgatgccgtattatctgtttactatgccgaaattaaaactaatcagaaattgattaagaacttagataaagcaattacagatatcgtccaaacgcttcctgaagagagaatactacaatctattccaggaattgggtcagtttattccgctggtattatcgctgaaatcggcagtattgatcgctttgacactgaagcacagctagctaaatacgctggtctagcttggcgtcaaaagcaatctagtaattttgatagcgaacacaaaccgatgactaaaaacggaaatcattatctaagatattatttggttgaagctgccaacctgattagacaaagagatcccgtttttcggaagtactatcaaaagaaatacgatgaagctttctattctccgcataaacgcgcttgcgttctttgtgcaagaaaattaaccaggaccattttcactctgctcaaaaatggtcaaatctatcaaacaccgaggtgattaattggtctaaaacatttttggaggagtaaataatagttgttaaaaaatcccttgaaatagggcttagtttcatgcacgcaaattttggttttaaaacaaactaattaaaaataaaatttaacttttacattgacttattaccacatgactctctactatctattataagcaagctgtcaattactttacataattttaattattatgcaaaaaaagaagccatgacctgaaaatcatgacttctcgcgaattcctcgtccgtaaatcgaaatcttcacgaacatttttaccttaacacaattaattatactagtctaattaattttaattactaaagcttcatatggcttcaatgagatattctctcctagtttgccatcttgtgcagaataattgctcaatacgagttgataattcttattttgatattgttcaggcaatggtgctacatgatcagtaccatagaaattagtgaaaactaatatttttttagcttcatctttcaaaaaacgttcataggcaaaaatttgtggatcatcttttaaaaacattctaatatggccatcagaaatcagttgttcgtgcttacgcaacttgatcaatttttgatagtaagcaaaaatttcaccctcgtgtaattctttttcaacattaattctatcttgatctgttggtaaaagccatggctttgattcactaaagccagcaaatttactatcatcccagtgcatcggcacacgagagttatctcgtgctttagtttttactattgcaaatgcttcatcatcgcttattcccttttgtttcaatgccgcaaaagcatttttagcttcaacatctacataatcatgaattgaagaataatgtggatccatcattcctatttcttcgcccatataaatgtaaggagttccgcgcatacaatgtatcgcagtagcaagcatttcggaagatttctctcgatatttaccagtatcaccaaaacggttaagggcccacggctggtcatgattgttccagaacaaagcattccaaccgccaccttgatccattttttcttgccattcagtaaataagtgctttaatttcatgaaatcaaacggctctttagaccacttttcaccatttttataatcgacttttaaatgatggaaagtaaagaccatggacaattcatgctcactcggcttagagtactcaatcgaattagcaatagtagttgaagacatttcacccaccgtaattgagtcaggatcttgaccaaaagtagagcgattcatttctttcaaatattgatgcactactgctgtatcagtataaagactcttttcctgacttggatcaccagttgaatcaactaacttttcatccttaccggtcacgttaattacgtcaaaacggaaaccatgtactccctttgaacgccagaagttaattactttgaacaattcttgacgaacttctgggttatgccaatcgagatctgcttgagttggatcatataaatgtaggtaataataatccgtatcaccaaattttgcccaagctggtccaccaaacttactttgccaattattaggcaaggagccgtcaggcttagcttttcttaagtaaaagaatttgcggtacttttcgtctcctgccaaagcttttttaaaccatatattttcggttgaacaatggtttagcaccatatccaacatgacgccaacgcctatttcttttagctttttagttaattcctcaaagtcagacattgtgccaaagcgaggatcaattcggtaataatccgcaatgtcataaccgccatcattctgaggggatacaaaaaagggattaaaccagatcatatcaacgttaagcttcttgatgtaatcgattttagcgatgatccctggaatatcacctactccatcgccattagaatcataaaaagatttgggataaatttggtaaattacttttttgcctaaatctgtcatttttatctcctataacttaattttctgtctacgagcaaagtcaataaatttaaactttttaggattatgaaaggataaagttaactgaaacagcgttgtatctgctaaaaaattatgactagctactagtactgcttccttactatccaattgcaatttctcttgtaaatcagcatcgatttcttctaccgtaattgccttagttgcataggatatatctagccctaatttattttctaaataattgtagattgatttttctgcttcttctgatggaagctcagtaattggtggattaaataagaaatcacagtccagcacttctggttcatcgttaatcattcttaaacgttcaacatagatccctgcatgcttcttttgttcagggaagaatttcttgaaaattgccggcaaatcatcaaccatttcatcattaagtagcttagtttttgcattcattcctaatgatttatttaattccgcaaagctagaaattcctgaaataggaaacgaaaacttttccaaattaaggacaatcgaacctttgcccttgattttttggattaatcctaacgaggtcaattgctgcaaagctttacggactgtttcgcgtgacgcgccataaagctctgtcaattgattttcactaggcaagcgctcgccttccttaaattgttgatgtttaatcttagaagctaagtcttgagcgatcagttcagattttgctttagtcatcttgaccttgtcctttcttaaaatcatgttcattatatttttgatgtacgtacatgtcaatagatatatctaaaaactatattgcaggcatgtaatcattttcataaaaatctattgacaacttgtacgtacaggaatattataataaatgaattttgtgaaaacgcttttataggaaagggagaataacacttatgaataaaaacgaaattgcattacttgctcctgctaatggtcaagtaattgcactaagtaaaacaagtgatcctatctttagcaaaggaactatgggtgatggttttggtttaacaccaactgataatacagttcttgcaccagttagcggcactatctcaatgattgctgaaacaaagcatgcgatcggaattactactaaagatggtctagaagtattggtccacatgggagttgatacggttggacttaaaggtgaaccgtttgatgtagtaattaaaaatggtcaggaagttaaagctggtgaccaaattgccacgatgaatatagagatgattaaagcaaaagatcttgatactacgattatgactttaatcaccaattcatctatgaaacttgatggcttagatgtaactgaaggtaaagcagaagctggcgatacagttgctcgagcttatttaaaggagtcaaaagaagatagttcagacaagaaactttcgtatgatgaattagctactttcattattaagaatgttggtggtaaagataatataaataacctgattcactgtatcacacgtttgcgcttttatttgaaagatgagtctaaagccaatgatgatattttaaaaaatcaacgtggcatacttgacgttatgcatgctggtggtcaatatcaagtcgtaatcggtaatgaggttaccaatgtttacgatgcagttatgaaacaattgcctggtcttagtgacaatccttcacctcaaactaataatcaggatgatggtaaaaatcctgtttctagagcctttagtaatctaattggttttattaccggctcaatgagtcctgtaatcggtgttattgcagcatcgggtatcatcaaaggcttacttgcactactcacccttccacaacttggtgctttacttagcgtcaagagtccggtctatgtcacagttagtgctatggccgactctgctttcttctttctaccagttctagtaggatttgcagcagctaagcggttaggatccgatccaatgattgctgcagtaattggcggtttcttagtttatccacaaatgattacttggggcaagagtatgacgacaatgtttagtcttggatcttggaacttccaattcttaaactattcctactctatctttccaatgattttagctgcttggctagctaaagaatgtgaacagtggttaaagaaagttttgcctagttacttgcaaatgatctttaccccattaattactatccttgtagtttcaactatcacattagttattaccggtccaatcattcaaggagccgcaaatggtatcgcagtctttattaactggctagtatctgcatctggctgggttggcggcttaataatcggtgccttttatcagttattggttatttttggtcttcactggggcgttgtgccactagttgctcaacaaattgcctcaactggtcaaagctcattaaacgcaattatctgcgcaacaatggtttcccaaggtgcagctgttcttgcagtcgcaatcaaatcaaagaaagcagatatgaaagagctaggaattgcagcagctatttcagccttctgcggtgttactgaacccgctatttatgggattaacttaagatataagaaggtctttgcttcaggttgtattggctcagccttcggtggcctagttactggtttaatgcatggtactatgtatggctttaccggtggtctaattggcttctcaagctttttcaacccggcccatcctactccactaaatagtttctatactttcctaattgccagtgctgtttcaattatagtttcatttattgcagtttgggtatggggatataatgacaacatgactatgggtaaaaaagtagccaagaagcaacgcccaggttcagctaaataaaaatttagagcaaaataaaacgatgaatcacccacaaaggtaaattcatcgttttttgtcttatttaagcagcatcagcaatccgttgtgcctcaattaattcagcttttctgatatcacgaggcaagaactgacgaatatcttcttcattatagcccacctgcatccgatggtcgtctgcaataataggtctctttaataatcctggattctgagtaattaaagcaaccattttagacaatgacaagtcttcattcaacttattctttaattgtttgaaagactgtgaacgagtagataaaatatcctcagttccattttcagttaaagacaacagatgaaggacatcttctttagataattccttaaagacgttcttttccttgaaagaaagatgatatttgttaagccatgctctcgccttacgtgaagatgcactacttgttgacatataaagagtaatcatacaatacgcctctttctaaaaaactcgttaacttctcgtacattagttctattgtataacttactttttgatagtgcaagctatttttacaaaaaaattgttgaaaatagtatacttaccttactgaaagaaggaatttgatgaattttaaaacaccaattgccgaacaaatgaggccgcaaacactggcggatatggtaggccaaagtgagttgctgggaccaggaaaggctttaagaaatattatcaagcagcatgttaatatttctttacttctctgggggcctcctggtaccggaaagacaagcttagctcaaattattgctaaagagaatgattatccctttgcttcctttaatgcttcaattgataataaagcacagttgaacaacattattaatgcttataagtatcagactctcgttcttttaattgatgaaatccaccgtatgaccaaaaatctacaagattttttattaccttatttagaaaatggtcacgttctacttgttggctctaccactgaaaatccaattatgtcgattgtgccagctgtgcggtcacgttgtcaaatctttgagttcaatcctctaacagaagacgatattgcagctgttttgaacaaggcatgtactaaggtccttaaattagtagatcaccaagttgaaaaaaattcgttaaatttgatagcagccgcagctgatggcgacctacgaattgctttaaacattttagagactgttcatgcacttaatcctaaaaagatcaccttagcaaatgttaaatcgtttactaagcagcaattctttagctatgataagaaagccactaaacattacgattatttagctgcatattctgactctatggctggctctgacacagatgctgcactttattatcttgctattttgctaaaaaatggagatttagcttcggttgtacggcgtctgcgtgagattccatatacttatattggcttagctaatccgcaacaagtaactcaaattgttactgcagctaatcaagctgaaaagataggaatgcctaaagctaaatatccactaatgtttgcaacaatgttaatgtgtatttcgccaaaatcaggagcatttgaggaaatttgggaaagacttgatcaagatagtgatcatcccaatcggtatcccatgcctaatagtttgcgtgactttcattataaacacgctaaagaaatcacgggagctggcctagctgagtcaccttttcaagctccgcatcaaatcgccaagcaaaattatatgcccaagggactcaaaggcaaacaatattattttccaaaagacaatcaaaatgaacgcagattatatgagcaatacctaaaattacatcgttatatttacggcgaagattatcaaaaataaaggacagcaatgcaattgagcatccctgtcctttttggttagattataaatgaagaaaattggtttattaattgcttctacgagagaagattctcgtccagccacctatatggtagttctatttaagttatttgttaaatgctaatcgaaaaaactttacgtactttttacgtattttattaccaataataacaaaaaagcagcggcgcaaatacagcgtcactgcaatatgtagcaagattatcaatgaagaaaatggtatttatcacttctaaggaggaaggatatttcatctagccacttatatcctaatgctacagtattaatttgttaaataaaacggctattaaatctaccaatatttttctagtggcttttcattcctaccagtgcgagtttgacgcaaatgttcagtcacaatattagtcaacacttcggctaatttatcaatctgctcaacagtcacatattcatatcggccatgataattgccaccaccattaaataagttaggtgtaggaattcctttaggcgaaataaagtttccatcagttccacctctaaaggattgtacatttggctttagtccagacttgcgataagcatcaagagccagatttacaatatatggcttgtccttaatatagttgtagatattttcatattgctcacgaatatttacagtaaatctattgccatactttttgttcatctttttaactatatcgcgaataaactgttctttacggttatattcactttgatcaaaatcacgaataatcatgctaatatcggcatgatcaacattgctttgagcatgtagaaccaagaaataaccatcatgattacgtgacttttcaggcacttgatcctgaggtaaattagacaaaaaatcattcatcaaagttgttgcgttaaccatcagaccatatgcttcaccggggtgaactacagtccctttaatatggatcgtaacctctgacgcattaaaggtatcgtattcaaaatctcctggccgcccattgtctaacgtataagcgaattctacattaggaaaatcagctggatcaaaatattgaccaccacagccaatttcttcgtctggaccaaaagcaacaaaaacatcaccgtgttcaatttcaggatgttcagttaaatatttaagcattgctaatgccccagtgattccagccttatcatcaactcctagcaaagtatgaccatcagaagtaattaaggtttgtccttttagatttaataagtctggaaactcagttggatcaagaacaatattatctttctcatctaggataattttctgaccatcataattttcgtgaatttgtggcttaatattaactgcgttaaagtctgcagtatccacgtgagcaaagaagccaataggcgttaccttttctgctgtgtttgcacttaactttccaattgcaaaagctgttttttcattatagtaagcatcaagcccaagctctttcatttcctttactagttccttggccagctcaacttggccaggtgaggaaggaatctgatcatgatgttcataatatgagcgagtattctttttagctaactgaataaaccgtttttcttcataatctaaattataaaaactcatatcatattccttcttacattaattccatcgtatcacttgaaactggctcagacttgggatctgaccaccacgactctttaactgttttgataattttaaaaccatgctttgcatacagcgctttagctgctatatttgcgctaaagacttctagcctaatcggccgtctaatatttggtaacactgaagctagcaattgatcaccaataccacgtcgttgaaattgaggatcaatataaaaataagctaaattatgtggcttatacgcagcaaagccagcaaattcattattaacttctacaatcctaatctcagaatcaaagaaattataccagtatggtgcttccttaaacggaataaaatatttctccactccgcctattttcatttcttgcaaacgagccgcatcatgaacccggcacaaatcttcgtaatctaaactttgaaaacatctagttcttacttgcataatttactcctttaggtgaaagagttaataaatttttatttttctttaattatacagaagtgaattatacatttaaagattttagttccaattcaaccagtcttcatcaaaaaactcaactttttcttcctgtgattctaatttctcttgttgcatcatagctattatcatctcatctttctatttttagaccattagttcgcatagaaattatatcaaacaaaggttcatctttctactctttttcaaaaaaatattaattgagttagtaatagatgtgaattacctatatttttatccacaatcgcgataatatcgggcttcagagccatgtttcacgtttattgtttacatttagctgtttttccaagtaatcaaatagcttttcactttataaaaattgtttcataaaaaaggatccaacttaatggatcccttaaacatgttattcgtaaataattacaggttcgccctttttaatattgttccaaacgcttcgaatctcacttggtttaacattaacacaaccatgtgagccaccctttaggtaagcggtcttgctccaatcagtccgccaagaggcatcgtgaaaaccacagccacttaaggtaaatggcatccaatacttaactggagaagcataacttgaaccatcatcattggtcccacgcaatgtacttggtgattccttatagtggatataccacaccccacgcggagtttgatcacccttagaaccttccatagtaccggtaacaacatcacgaagatgaacggctagtttaccctttttgatcaaccatacttcttgctttttcaatgatacaacagcataagtatcaccaatctctttatttgaataaccatagccgtgaggataagtgctgtagcctaaaccgtaaagtgcatctgcaccatcaaaatttttttggcctttggcaaatgcttcgagaagtaagcgttgcgtctttttaacataaacgccccaaccccaagtcttattctttaccgttatggttttgcctttaactttattgccctttggcactgtaaatttatagctcttgtgtaatgttgaaacttctttatcaatttgatttaacttagtcgttaatttactagtatcaccaaattgatagcgattatctcgataagtcacattattcaataaatctttggcctttaattgatagtttttgccattaattttataagtaatctctgctttgcttaagtcagttagtttctttttagctgtagctaaattactagtagtaaacttataagtctgagtcgatggaattttagtttgttgcttcttaaaaaaggcctttgtctcggactcatctaatgattggactgtagtgttatagctataaaccagtttgttattttttaactcaacttgatttttagctttttggttaactttagccattgccttagtaacggttagctttcctactttaactccatcgattgtaacattagggttaaagtgagttttagcatatttttctgctgcagcttgtgttgccacacggtgattatgaatgccaaaacccgcgattactccaacgataattaaaactgcaatcgttaaaataataatattgtttcgtttattctttttctttaggtcttcgttcatactatcctaccttttatgccagtaataatatctttaatatagcaccttgcaaatttcgtgtaaaatctattgatttatctaaccttttttataattagacgactagcatcccgcaaagcaaaatataaaattggtgtacaaattgcagtagaaattgaattgattacagttgcaggcaaactaacaaaggctccaactaacgctactttaaagctcgtccccaccattaaagcttcaacaattgaaacgcaataagtagtgaatatcttagttacccctgcaataatacctaaaataataatatttcttttactatcttgatagtgcattcctcgataaactgctgtcaaaaccgaagccactactactacctcaagcatagttaaccatgatgttgcggcatagccatttaacaaatcaaaaccacctagaccaataattcccgcaatcataccattacgataacctaaatataaaattgctacagcagttagcgtatttccaaaatgaataaatgggcgtcctaccatagcaggaacggggattcttaacacccagatcccaatataaataattgccgcaaaaagtcccgttaaaactaaagcttgtaaagaattcttgttttctctaaatatctgcattattaattattactccatctcttcagtaaatctggtaaagctgctgcataatttggtcctagacgtgaatcttgcttgggtgtttccctgattgcttgtgcaacaaaatcggccgcaattgaacacgctttttctaaattttctttatgcattaaagcagcaaaaaatgcacttgcaaacaaatctcccgtaccaaaataattacctgggagttttttctgaattaaagaccaactatgatcggctgtaattccaacttccgcaattttttccttattaagtgaaataccggtaattatgacattcgagacaccaaattgactagataattcagccgcaaattctgttgctgttttcaatgaattactagttgcctttttgcctaataaaaatgctgcttctgtcatattcggcgttaaaatcgtagccgacttaactagatttcgcatctttattacatagttttcatcaatgccacgataaagttgaccgtgatcacccattactggatcaatcaagatcaatttatttttttgtttaaaatagctaatcttttctgtccaaaaatctaatgctcttttgcccaaatagcctaagtatacagctgaaaaatcaaaaccaaccttttgccaatgggccataatcttagccatttcattattcaaacttaaaaaagtattctcaccaaagccacccgtatgtgtagacaaaattgcagtaggcaatacggtcgggctcaagccacatgctcctaaaacgggtaaagctgcactaagtgatacttgaccagcacaagataaatcttggctaactaatacgccaccattaaccatcttttttactccaatcaaaaaaaccctgctttaagcttaacatgaagtttaaagcatgaaaaattttattttgcgctaaatgtattagccttgatatgattcaaaatttgataaccaatttgtttatttctgttttcatcattttgagtttgatttaagaacataatcaaaccattttgattatctgtagtcatctgaatccagttaccaaagtgagtattatataagttaccatatgctaacttcaagttatcattattcttcatatataaaccacctgaataaccatttgatgaacgtgatgttaaatgagtcatataatcaaagtctgttcgactcaaaatttgcccattggttaaaccaagttgaatacggtaatagtccattggagctgagaacaaattaccagcacctaccaattgagaagcttgagtctttttaacatattgagcccattggtaattcttttgattccaggtatatgagataccatccgtcatcccggctggaatatcttccaagaaataagttcgctttaagccaagcttattaataattcgttcctgcacattttgcttgtagctttgtccagtttcttgacgtataattccagctaacaaaatatagttggtattattgtatgaaaaattaccaggttgattttgcgtagttgagtttagcttattaacaacccaattaattgcatcagcttctgaataaacacgtcctctatttacttcagtatcagctgctgtcaatccagaagtatgcgtcatcaagttgccgacggtaatattatcagcaccttttaaattaggataccacttagagatcttagtatactgtgtaaacttccctgcagaaattaattgagtgataattgcgccggtaattactttttgcaaagaacaaacaggataaactaccttactgtttcccgcacctaatcgcttgccataataaccataaccataagaaatttgttgtggttgtccatcttttactataactacggtaccacgagcataataactagctaatgtatttctaacaaagctccgcatttcagttttgttataacttgctgcctgaactgtcgagctattggcattagcaattgccattccaacaggcattgaagcagctatagttaaccaaatggttgatttgattaatgttttttttaaattaatacgtttcgttttaaattcccccagcaatgttatgtaaattctacccataatattagcatttatttttttcattggggttacaattttgataaagaatcaatgagaacgtatacattttctttttctaatatggataattatttaaatgatcttgatcagtaatctgacgtattactttagccggtacccctagtgccaatgaattatctggaatatctttagtaactaccgatccagctccaataacgcaatttttaccaatttttacgccgggacaaacagtaacattgctggctaaccaacaattatcgccaacagtgatagctgctccatattcaatatcggctatttttccgtctgattgcttgcgagcatttctttgagttggcaacaaaggatgcaatggagtcgcaaatgttacgttaggtccacacattacattatttccaattgttacgggacaagtatccaaaatagtcaaattgaaattagaataaaaattatctcctaagtgtgtaaattggccataatccacttcaattggtccttgtaaatatacattttgaccatgattcggaaaaagacgatcgataattgctttccgttctacctcatcttcatcagtagtcatgttgtaatcacgtgataagcgatgagctaaactggaaatctttttcagttcttcagtatctgggcgatatggtttacctgccaacatttttttagtattttcttccatcgataaagcctactttctaatttaatcgcttacttaaataaatcatgtctactagctgatgtccagcttcaaaaatcggatgatcataattttttacaaaaaaatctttgatcttacctgagcgtttaaaaccacatttttcataaaaaggaatagttaaggggctatcacccgttccaacttgcaaaatttgatatttattttgatacttcttagcaataaaattaatcaaatgtttagcataccctttaccttgatcttctggataagtggctatattttttatttctactgtattaccattttcaaccgtaataacacattcagatctaacttttcctttatcaatcaagatatacataattccacgttctaaatagcgatcaatcatactctcttgttcatcagctaacaaaagtaagtctatatactgcttcttattagattttatctctttaatttccatgattattttccaattaatttaaaattttcgtaaattgcaataataacttgaacacttttgtttaggctgtttgatagatgcgatctaattctctttcaaagatctcatctggtgtatgataagccaagatctttcttggcaatgaattgcaccaagtttcaatattaatgatttgttggagagagtagttatgaatatagtcacctttaggaatgaatctgcgaataaggccattatgcctctctacagtgcctttatcacaagaagtatatggatgagcataataaactagtgatttggaaatatcttccagctgagatagatccgcaaattcagaaccattatcagtcgtaatagttttaaagatatcgttccaatgctcgctgtattgcttgcgcagacttttaaaggcattcattacactggcagctgttttatctgggattttaataattaggaactcacggctcatgcgttcagacaaagttagcagcacttcgtcgtccttggtcttatggcctaaaacaagatcacattcccaatgcccaaacacatcacgcttattaacttcctgtggtcgttgttcaatactgcggcctagcttcttcttatttttacgaatgcgatgaattttggtattgcgcttgagtttctctggcaaatcatagttatggatgtttaacaagccttgatcgacataattataaagcgtcctagtgcagacaatatcgttgctggtaaattcccctacagcagtgcagcgattactgcaggcgtcgagcgaccagccatcttcaaaaaagtgctgttggacgtaatcaataaacttatgcttcttaagaaaatccgatttgcgtccacagtatcgacgattgttttgataaacactctgaccttgttgggctttataacgtttaactttaccgtgatacagcttaacagcccctcgtttgatctcatagtgaattgtactaggggaacagccaatttctcgagcgatggaacgcaaagaacaatgatctttcaaacgagtttgaataataacccgctcttcaagcgatagatgtgttccttttttacgcttgtccatgatagaatgtagtgagtccattttgacctccatagatgtttttgtggttattaacattctatcaaacaggtccaaatggacttttttattttgtatcaagtgttcaatttaattttacaatcggcaaatttaaaatttttctctttctactcatattctatgataaactcattattgttataaaaataagtataaacgaggaaaaaatgcgcaaaaaaaatatttattctatttgtatcggattaccgatctttttgattcttgcattctctattatggctcatgcaagttgggttaccggctttgacaatttctttgaaggcttagtccacagtattcctaatctgcagagcattatgcatgtaattacatttttagcagatactaaagttgacttagtttggatgctgttgatagctgtcattctttggctgaaaaagcagcgtcctctttcggcaagtattgtcatttcactagttacagctgatgcttttggttggattgttaaacatataatccaacgggcacgaccaactgctcacttagctgctgatgatggcttcagttttcctagtggccacacattaggaatggcgattattgttttctggctaatactaatattgattccagctttagttaaaaataaaactgctaaaatctggctcactgttttattagctatttggcttgttttagtaatgatttcaagagtttatctctacgctcactggccaagtgatgtttgcggctcagttgctatgggcttaatgtggattggcttagtagatgcaatttgggataaagttactccacaaacagacaaaaataatttttaagattaaaaatagtcgacgataagtcggctatttattttgggcaaaaagaaaaagtcactaaggaaaatgtccttaatggcttttctacaccttcaaatttcttcctatcagcagatgtcataagaaacatcttgcttagccttttcatcctcggagcgctcatcacacgctccgctactatgatatcaaataaaaataaaaagataaagatttttacttgataaatttcaaaaaaagtatatgaattattaaaaatcaaatttgtatattgctatcatttttaaccttttttagctccgatttaactgatttgcttttagcattgttaattgtcttaaaaaaggcggaaatttggccaatttctttttcggtagtcgaacaacagccacctattattctagcaccatgttcataccactcttggcttaactttttaaaatcgaattttgcattaaatggaatccaattgcgctcaaattcgttataaacgccacccaagttaggataaatgacaatttgtttatcagtaaaatcatgaattttatcaattactgcagttgctaaaaacggtttaaagcaattggctccaatcgcaaatacttgatcatattcattaagcttttgcactacccgctttaaaggagtgccatcactaattttagttgtatcatgcaatgtaaaacttacatacactggaatttccggagcattttcctttaaccaatctaagattgctacaacttcatccaatttaggctgagtttcaagtgcgagacaatcaggtttatttgccaataaaatcttcaatcgtggtaaatgaaaattaagatattcctccgttgttagagaataatctccgcgaaattcatccccttgagctaaatatgcaccataaggtcctactgaagccgctacataattatgaattcccgttgtctttgcaaaatcatcacgggcttttttggcaatttgaactgcattagtaatcaatttagtagcctggtcttgtgtaaaaccatgtttttcaaaagctgggatatttgcttgataagtatcagtaattgccatctgggctccagccttaaaataattcatatgtacttgataaatttgagcaagattatgttctaatgcaattgctgtccaaagttcattatttgtatcaatgcctaacttctcaagagctgtagacattgcaccatctaagattaatcctcgatcacggatctgtttgagcaaattcatttttctcaccttagtataaattgagtagatagttaatatatatttaatattgcattaatcttagatctgtttcaaatattatttcttcctatgtcttattttttagctacagtttgctataaatttatttaatgctattttcatataatattaaaatagatttttgaaatcatgtaaataattggccaaatagtgtgccgttaaactttcaggcttttgctttaattctaaaggcttaccctcttggacaatccgaccaccgtttttaccaccatgtgggcctaaatcaatcatgtaatcacaattgacaattaaatttaaatcatgagtgattgtaataatggtagctccctgatctaacaacttttgcattacttggaccagaaccttcacgtcaagaggatgcaagccaatcgtaggttcatcgaaaacaaacaatgcatcattttgtttatgactaagatgagtaacaagtttaaggcgctgagcttctccacctgacaaagttggtgtatcttctcccaaatgtaagtaatccaagcctacttcttttaacaattttagctctcgttcaatcttaggcactttaacaaaaatcggtagagcctcattaacatctagatttaggacatcaacaattgacagatcatgccacttcaccttttgtacatcttgattataacgatcgccatgacaggttgaacagacttgttgcatatctggtaaaaattggatgtcaagagtcacaattcctgtaccaccacaagtaggacaagctccttgtttattattatatgaaaaccaacttgatgtataatgcttctttttagcgagtggctgactagcatataactttcgtaaattgtccataattgaagtataagttgctacagttgaccgagtacttttaccaattggagatgcatcaacacttactacatttgaaattgggctagaaaatctactaatttgttttggcaatttttcactttggctttttgctataatagcgggtactaaactatccagaatcaaactagttttaccggcacctgaaaaaccagttactgcagttaattggtttagtgggattttagtttttacatcatgtaaattaaaatattgctttacttcaaataaaatagaatcggaatttattcgagtggctggctctctggcaagtagtttagcactaccatccaaatatggtcgaattaaagaatgttgatcatgtttgattgcagtaattgaaccttgatccaaaatctgaccaccttttttacctgaacctggaccaatctcaattacctcatcagcggctttaataatgtcaacattatgatcaacaactactaatgaattgccctgagcaactaactttcgtaaaaccttaattaatcctgcaacattagcaggatggagaccaatagaaggctcatccaaaacatataaaattccagtagtttcagtacgtaatgttcttgctaattgaattcgttgcaattcacctgtcgataaggtatttccacttctagccatagtcaaatagtctagccccaagtctaataatggttgcaaattatccaaaaactcctgaataatcgaatgagccattttatgcatattagttggtaaagttgcttgcacatctttaacccaggtaactaaatcacctaactgcatttcggccacctgattaatattttgcttaccgaccagctgttgtaacaattctggtttcaaacgactaccatgacaaagtggacaagtcgaataagtaaagaattcggctattcttttttgcgcacgttccgatttgctactctttgctgaacgatagacagcttgccgagcattttcatataaggcattaaaatcatgaaataccctgccagttcctgataaaaagtccattttatatttcttttcaggaccatttaagacaaaatctttttctttatcagtaagatctttataaggaatgtcgatcctaacaccagcatgttctgcaacgttaggcataaagttccgtcctggcaagctccaagatgcaactgcaccatctttaattgacaaattttcatccgtaatcagtttagattcatctagttgccgtatcttaccagttccgccacactcagtacatgcaccatctgaattaaaagcaaattgttcggcacttggtgcataaaattttacaccacagactggacaagttaattgtcccatttgctcacctgacatactcattgcctttgcaattgccaaacttggcttcaaatggtgtccattaggacaaactggagaacccaaacgagagaaaattaagcgtaaaacattaaaagtctcactcaaggttcctactgtagctcgctcatttggtacacttggacgctgccgtaaagctaatgcggagggaatatgtttgacgctagttacatcaacctgatttccctgtttaattcgcctacgcatataagttgacagagcatcaagatagcgtcttgaaccttcttcataaagaatccccattgctagtgatgattttcctgagcccgacagtcctgaaattgctacaaatttattcaaaggaatgtcaacgtcaatattctttaagttatgtactcgtccgccacgaacttcaattttcgttggaatcgtcattaaatatcccctttccattatttagtcattatctcttttaatctataatcatgaattaccaacaagcaaaccaatttttggaaaattatgacaaaattactattaaaaatatgtgttatatgatatattataagtagataaagtaagcgcttacttttgaaagacatagaaatgaggtgttgttgtgatattgattaaagaaaccgttgttttttcttttgatagatataaaaataccacatatttagagacacccatcaagctaggagtcatgcgtaacggcgcttgattcgtgtcctaaataaaaatgagggttacattttgtaactcttatttttgttcttaaaatacaaaagaaaatcagtacaaaacacggagtttgtactgatttttaatattctaaaggttaattatttaacccaatcgcggacttcactatcatcacgtgcaacaccaacaacattcagaccattagcccattctttaaagtgactgacataagccttatggttagtgcctgctgaggtaaagaatgatgcaacttcaccacggtagtttttcatcttttcaagtaatggcttaattggagttgcaggatagcctgaccaaacagggctaccgactaaaatcaaatcataattattaaaatcgatatcatccatttgaatttcaggataaggaaccttaccttgaatttgatctagagcaatatcgttggtcttgtacatatctgaatcaaaagcgtcaggagcaacagttacttcctttaattcgctgttttcaatttctccgttaatctttttagccatgttcttggtattgccttcccaagaataatagataattaatgtttttttagccataaatttagtccttctttcatttacatttattgtaataaaaaaagaccggtttgaccaatattttaatacgcgtggtgctagttaaatcgttttagttaataactgaaaattgaaagcaccaaaatcaagctcaagtcctgtcactattgagctttcttagacgtaattagtttttatatgatctgtttcagtgcaatttgtatgaatcgtggcagttggttaataaagtcattgattacttcatctatcttttcaaaactattctgtttaagctcttttaattctgaaattaagtagaccaatgcatctacgaatctaatatcaggtaaggattcgttcattagatagaataaatctccgattgtcttatcatctgtattttgtctttcctgccaggtcaatagatcataagttattgctgtaactgcgatatagccacattggccatcatagctttgaacttgagatttatctaaagcaagatattgcttagacgtcttaaaatatgtttcaatttgccatctacgaccataaagttggatgatttcttcagggctaagctttgtctgagtagtagctaaaactaaatacttgttcttgtttccacggttggagacaaagacgagctttaataaaaagctatgtccatgatattgagcctcaactatgcttgaataaagataatgtttctttttacggatgtttgaagcagccaaacgatcatacaagtctttaacgctatagcggcgatggcgataaatgtaataaatctttgaactcttcttgatcatgccaagtccatctaaaccgatcttctttaaaatccaaaacattcttggagaagaaaaccaagaatcgaataagaagtatttagcttctactcctaatcgtaaggcttgtctaatcaactctacagttacatcattcatctttctctgagcttgatttctccttttaccagaaattgaacgttcatcagcagtaatgggagcagctccaatcatatttttcttggttttggttgacatcaaggcaaagttaaccggcaagaaggtattgccatcgctccagcctaaagttaaaccacgatatccgttcaaatactcatgcttgtcatggtcatagactttagctagcaattcggtctttttagaaaaagaccgagccatcagcgtatcgtcaacgataaaagcaagtcggcgtcttttatcgataaatggttttaagcagccaatgagccgggctgcaatcaagcataatagtttttgccagttgattcttccatcgttaagtacattgcgagcagttctaacggaaaaacgtttgtcatccttagctctgaataaagaaagccgagcaaaatgtactgacatcagccaagagataatcatggttaatgaaacggtggatttacgcttaaaattgacttgtttagttaacttagctagaccaattagattaataaatgaagaaattaaggatttagtatcattttctgtgtcgatttgttctatactgttcattgcgcaggatctcctttactttttaggtcgacacttaaagtataacgcagagagagcctgcgtttttatttttgataagaaaaagccaagaggcgcggggaaggagcgttaatcttagctttcaagttttagttaataaaaaagtccaatcttgttagactcaacttgtataataatagaaaagagcctgatctgattgaactgccttaagcttaagcgttttagccaccatttacaagttagttttaaagatttagtgataatttgtcggcactggtatcgtttgtatgcaccggctgagtttactcatcggcgaaatattgatcaaattaaaactacggacagtctgattttggctttacttatctggcaagctaagacaggaattgaatcacaaagaagattctgtgaatgtttcaattgtttatcacactcacgttttaatcggcgttcacgtcagctattgcaattgatttatcagatacggcaagaaatgaataaaaaggttgacctgaatggacatttcttgatcattgacagctttccggtacctgtttgccaaccaattcgcaactatcgtgctaaaatttttcgcggttatgccaacattggttataaggccaccaagaaaatttacttctatggtttcaaagttcatgccattgttagcgatgacggttccattcttgattatgtcgtaacaaaagcatcagttcatgatgccaaggagacagttgaactgctggaaaatgcccatccatctaattactatcttcttggcgacgaaggctatttaggcaaagaactgcatcaacagctaaaacaaatgggttatgaactttggacaccatatcgtaaaaatatgacaggagctaaaaagcacaatgatcatcaattgatggctattcgcagaacaattgaaagcgacttttcgcttctgatctattacaatgccgagaacaatcgagcacgtagtctgataggctttcaaagccggttggaaattgcaattttagcttataatttggcttattgtctagaacgatttaactagcaccacgcgtattttaatattattattttagctattttccttttcttttgattatttccatcatagcctgaccatactttttcatcttcgcttgccctacaccacttacctctaaaaattcactttcattttgtggtttaatttgtgccatatcgtgcaaagagcgatctgaaaaaatcataaatgctggtactttttgctgcttagctaattccaaacgcttttgtcttaaagcttcaaataaagtatcactttcttcaccagcatgagtagtagttactgaaatcttagcaattcgccgtttgactacagttttgccatctagtacatcccacccatgattagttacatgcactagtggatatttgctaccttcaacttctagataacctgaagcaattaaatagtcaatcaagcttatagcatctttttgcttcattcttagagagccaaaagacttatattgtgtagcattcatttcttgcatgcgctgattttttgagccaatcaaacattgagcaactatcgtttttccaaagcgaccatctagttcataaaccatactaatcactttttgagcatcaatggtaatgtcagtcaatttatcctgatttagacaatttgagcatttaccacatggcggacaatcttgaccaaaataacggacgataaattgctgcaaacattcaccagtattagcataatcagtaattgtttgcaacttacgatattgcagttctcgatatttatcatccgcatctgattcatcaataaagtagcgatattgacgcaagtcaccaggatgatagattaaaatcgcttcgctttcttccccatcacgacctgcccgacctgcttcttgatagtaactttccatattacgggcacttgaggcatgaatcacaaatctgacattacttttatcgatccccattccaaaagcattagttgctacaattacttgaaattcatcaaattgaaaagcttcttgtacttgacttcgttctgaagaatccattccaccatgataagcaccaacagagattcctttcttagccaaataatctgtcaaactttcaacttttttacgtgtattagtgtaaataatccccgctttatcctgatgtgccttaatatattctgaaatatataatggagtattttgtggtgagttgaccactttaaacgatatattagggcgagcaaaagaggtaacaatcatattctccttgggaatattcaattgttcacaaatatcatcttgaaccgcaggcgtggctgtcgctgttaaagctaatatatttggtctgctttttagtgaattgattccatctaataattgacgataagcaggtcgaaaatcatgtccccattgtgaaatacagtgtgcttcatcgacagcaactagatcaatatctaaaaaatttaactgatatctaaaataatcaatcgctaaacgctcaggtgtaatataaattaacttaattttgccttcatatgcctgacgtaaaattggattaacctcttcttgcggtgtagtagaatttaatgctgccgcattaattccattttgctttaaattatcaatttgatctttcattagagaaattaatggtgaaataaccaaagttacaccgggattaatcaaagctggtatttgataacacattgattttccgccaccggttggcataaccgctaacacattttgcttttttaaaactaaatcaattacttgtttttgacctgggcgaaaatttgtatagccaaatgtatcttttaaaacttcttctggattcataaacttatcctaactagttaaattgctactttttattctaaattaacaattcaccccaaacaagataaaaagattcacacttttaaataaagaaaaatgtgaatcttttagagttaaatttacttataaaaggtttcttctactgcatgagtaatcgcaatcttatcatgagcataggacaaaccgccctgaatataaagcatgtatggttcacgtaaagggccatcagaagaaagctcaattgttgatccttcaacgaaacttcccgaagccataacaacttcatcttcgtaaccatcctgatgatatggaattgggtcaacaaatgaattcattggtgaatagtgttgaatagccgcacaaaattttaccatcggatcaggtttaccaaaagtgacagtttgaacaatatcactacgtggatcactccatttaggtgaaacctgcatccccatttcttctaataaggctgcagtaaagaccatacctttttgagcttcaccagtagtatgagctgccataaagaatccttggtagatatcacgcaaataaccccaagttgcgccttcaccttttccagctcctggcactgtcaaccgtgaaccagcaccatcaattaaatcctgccggccaactaaaaaagcaccgccttttactaaacccgcaccagcatttttataaagagaaccagccattaaatctgcaccatagaaagttggttcttcacattcagaaaattcaccataacagttatcaatgaaaatattgacatcgggacgaacttccttaataaacttgagcattggcttgatcttagccatggtaaaagtcttacgagttgcataacctaatgatctttgaattgccactactttaattgaaggatccatgatatcttttttagcttggtcgtagtctacttccccattcttcaattcagtagtcttaaaattaattccccattccttcatgttaccgggcttattaccagcaagaccaattacttcttgaatggtatcatatggcgttccagttaaataataaagggtatcccctgggcgaagcatgctgaaaagaccaactgtaattgcatgagtacctgagccaaattgtggacgaactagagcatcatctgttttaaaataatcggcataaatatcctcaattttatcacgacctatatcgtcataaccatagcctgttgatggaactagatcttcttcaccaacatgatgttttctaaataggtccaatacacgttgttgattatacaaaacctgttcatcaattttttctaaacgaggttggatcattttttcaactttagtcactttatcgtttaactcttttggtaaattctctttccaagaaaaactcatttttaactccctatttatttttgattacttctgcttgtacgcataaactaccattattattttcgctcagatatactccctgaatctctggcacaaaaccaggaaacttttcaatagcatgcgccaagacttcaaagtacttttgatctaccgttccccacttttcaccgggtgcaacaatgaaaacacctggaggatatggcaaagctccttcggcagcaattcttccaacaacattttctaggttgaccagttcattttgatcttttttaaaaagctgatcagctgtagctggtgtcatttgatagtcttgcatccctgatttagaaaatagcttttgctgtaatacaaaagtattattttcctgatagtactcatgcatttcttgacacaactgtttcagggtatagccttgataacgctttggatactcattatataaaaccggcaaaacatctttcattaagtcatcttctagatagtgtttttcaaaacttaaaaaagcttcaagtaaagtatctagttctgcttgactatctcccggtgtaagtaaaaacaacaatgaattcaaatcatttttagctcgaataatatgattttccattaagtattctgccactaccgcgcctggaatacctactttctcatattttgcatttttaacatcaattccgggagtttttaccgtaatcttcaatgggtcaatcattgcttcgcctggaaccattttacggaaaccgtgccaatccgtattttgtcccatttcccaatattctgcattggtagccaattcatcagtcgaaatttcggcaaaattgtcaggaactaatggcttaaatagcttagactttttgagtagttttttccgccattcaattcccattcgcagagtttgatcccaccactttttatttcctgctccagcagtaacgtaggaattaactgttaatgaagcataaagtgggtatgcataactggaagtaacaaacttcagataagcatgattaaagtgcttatgatcaacatatcgtttttgtcctttaatatgagcatccttttttagaatctgtgacgcttgagccatacctgcttgctgtttatgtaatgactgagtaaccaaaatacctggatcatcaggacccaagttaagtagaagtggtgataaatgtctcataattggtacgaattcttcaaagccgccccaggcacagtcaaacagaacataatcacaaagtttaccgattcggtcaataatccattgtgcatcataaaagactccatcataggtttctgcttgtacgattgctaacctaaatggacgcttagcctttgcctttgccggatctatcttagctacttcagctctaattttatcttcagttaagaaggctggatccatttctccaattagtccaagtgcatttcgatcagttggaatgtagaccggctttgctccgctcattaccaaggcagaattatacaaagatttatgattatttcgatcaaataaaactagatcgccttcagataaaagtgcacttgcgcaaatagaattagctgaagtcgttccgttggtacagaagtaaaccttatctgcatgataagttttagcagctttcttttctgcattaagtggcgttccagcatgcgtcattgtatcccctaattgaggaacagtatcacttgtatcggcaaacattagatttttaccaaagaacttattaaaaactactccggcaggatgtttatcataatattgcccattatggtgacccggtgtagtaaatgaaattggttttgcttgagcaaaattgatcaagtcggtcaaaaagcctggcaccatttgcttttcatattctgtagctttcggagtgacttggtcttcatctacctgatcagttactttaatcaatggaatcggaaaaccagattgttctcttagagcttctgcttgttttattcctaatgcatcatcatttttgacaacaattgcggcaagttcagcactattttgtacatcgccaattggaattgacgaccaacctttcatcttattaacattgacgccatttccaatggcaattttcaaaaaatccatcctttttctttccattttgtccacgaaaccgttttacatattgcaaaactttaaaaagtctttataatttttctacagtatagcgtactttttgcattctttcttaaaatacgctacagctgaaattattatataaatattggaggtttttaacaagtgcatttgccttgctcgcctccgagaacagctatgtcaacacaacaataaaatagcttaacttggaggaatttttatgtcagaaacaatcgaaacagtcaatttcgaacccgaaaaaaaacactacatgtcatggccggttattgcattgatcgacttcgtaacgattatcagttttgaaaatattttttatccatttcaaaatcaaggcttatcagtagttgtatcttggattttcctactcttcgcctacgttattccttatgcattgatgtctagtcaaatgggcctaacctttactgatcaagccggtggattggcatcttgggtacgtcattcatctaacgatacactgggctactggacttcatggatgtattgggttcaaactgttccttatttggtcgatgtttctaattcagttattgtgtccttttcatggattattttgggcaacaatactttagacaagcatatgtctactttttggtttgggattttgacctttgtcattattcttgcctttattttggttgaaaatgcaatcaagaattcacttgaactactatctttaattggtggtggtgcaatgtttattatgtctatgctctttgttttacttgctgtttggtcagttatgcatggacaccatattgctacccaaccatttaacttggccgcatttaagccatcatttagtttacgttacttttctaccactggtcttctaatcttcgccatgtctggtgcagaacttgctgctccttatatcgtacaaatgcgcgatccaaaacacgaatttcctaaagcaatgtggatgttagctttgatgactggattcttgactatcttcggtactttggctttagcaatgtttttcaatgctcatcatattccacatgatttcaagatgaacggaccttactatgcatttcaactactaggcgaaagccttggttggggcaaagtattaatgtacatctttgctgttgttcaagccctctttatgatggcccaattagcagttttacttgatgcatcaagtcgtgtctttgccggtgacgttgccgacaaattcatgccaaaatggttaactgggaaaaaagacaaaacaggtcgtccagttcactcgtacactttaacttgtggtttagccttattcttgcttttacttactgggactttgccaaatattaattcaatttacaattggcttttaaatatcaatggtattatttccccatacaagacttgttgggtattcttcgctttcattatgttacggatgcaccaagagaagttccactcagattatgtcttcattaaaaataagactggtgcccttataatgggctggtggtgcttaatctttacctttatctgtgctactttaggatttattcctcaagaagcagaagcaacattcggtagtgcagcctttaatcaccaattaattatgaatattattacagttatcgtactctttggcttaggcttcttactaccatacttaagaaaacgcgaagaacgtaaagaaatgaatatataaaataaacatgcttcgatcagttcgaaaatcgaggcatgtttattttattattctaagatttcaacctgcatcttactaggaacattaacaaagtcgaattgtttttgaaaaacatgatcaaaccgtaaatcataaacagaaccaataattggtgttaatgcaaaagctcgtaaagtgttcatatctttagttttattagcataaatatgatgcatttgtggtttgattttataaattcgttctaaatattgtggacttacctcatcaacatagccttctagagtgaaaccaatgctagtgagagtttctcttccgcgcaaagcggtaattgaaactttattgtgtcccttaatatggcgataaaatgacttctgattagtcgttgcaaaaataagacgaccatcttcattaaagtcaatatcgataatattggtatgtggatcaccattttgatcaacggtaccaaaaattactgaatggaaacaatcaacgattagatctaggaattcgtcgttacttaaattacgatcgagttcaggaacatgttgtctcatattaatctttccgtttctatatactttctgtaatttttatctatattatttcttatagtgtacatgacacaattaactaaaaacaactttaatgctcattattttcccattttaaatgtataattgtttaatattaatttttctggtaaaattttagctaacaaaaaataagaaaagaggcagaatatgaatatagattataagaaattggtccaagccaaaaaggacgacattcttcgtgatcttgacgaattaatcgcaatcgactcatctgaggatttgaataatacttccgaagagtatcctgttggtccaggtccagttaaggcaatgaagaaattcttatcgtttgcacagcgtgatggtttccatatcaaaaatgttgacaattacgctggccgtgtcgactatggtactggtgaaaaacgtttaggcattattggccacatggacgtggttccagctggtgacggctgggtaactgatccttttaaaatgttaattaaggatggtaaaatcattggtcgaggttctgccgatgataaaggtcctgccctagctgcatattatggcatgcttttacttaaagaagctggatttgaacctaaaaaaaagattgattttattgtgggaaccaatgaggaaactaattgggttggcattgattactacctaaaatatgagccaacccctgatcaagtattctcacctgatgccgaatttccaattatcaacggtgaacaggggatctataccctgaccatgacctttaaagatgacaataaaaagggatcagtagtccttaagtcattcaaggccggcattgccgaaaacgtaactcctcaaaaggcctatgcaactattgttggtagtgatttagccacaatgaaggaaaaatatactaagtttttatcagataataaacttgaaggcgaattcactattgagggcgatgaagctaagattgaattaactggtcaaggtgcccatgcatctgcacctcaagttggtagaaatgcggctacatttttggcagtatttctagatcaatttgattttgctggtcgcgatagaagctggcttcatttcttagccgatgttgaacatgaagactttaacggcaaaaaattaggcgttgctcatcatgatgacttgatgggtgatctctcaagtgctccatcaatgtttgactacgagaaaaatggaaatgctgttttgaaagataatattcgctatcctcaaggtactgatccagataagatggttaagcaagttgaagaaaaatttggtgatatcttaactcaaagttttgcttcatttgaagaacctcattatgtacctggagacgatccattagttcaaaccttgctcaaagtttatgaacgccagactggtaataaaggtcatgaagtcgtgatcggcggtgggacttatgggcgtttatttaagcatggagttgcatatggcgctcaacctgaagatgctccaatggttatgcaccaagcaaatgaatatatgaaggtagatgacctaattaattcaattgcgatttatgccgaagctatctatgaattgaccaaggacgccgaataaaaatttttacatgtatcaaaaaagcttatatactgatcttgttttaatgcagtatataagctatagaaagttgctagtgtcatatatcactagtgacttttttatttttccaataaaacttcttcattatttttcttagattttagccaaaaatgatgtcccaagtaacaaatagctacaaaaggaattgtatagtacaatgctactctttgagttggatcgaaccagattaacacacaagaaagtaggcttgatataaatgcaaaatatggaattacaggataccatggggtcttgtacttcaattcactgagttgatgacctgagtttaaaaatgcccttctaaacttcaattctgaccatgcaatcgccgtccaaacgaatacaacagctaatccagaaatagaaactaatactagataaaccgtcgaggcagcaactttactagaaatcaaagcaaaaattccgtctaacatacttactactaatgacaatactggaataccacgcttattagttttggtgaatgctttaggaattgttccttcgttgcccaacgaccaaagcattttagttgaagcatacaaacctgaattggccgcagaaataattgcagtcaaaactacgaagttcataatatttgcagcaaatggcacatgaattaggtcaagcacatacacaaatgggctttgagttactccagccgtatgataaggaattaatgcggccataactacaattgagccaataaagaagataattaaacgccaaagtgttgtcctgattgcttcaggaatagctttctgaggattctctgcttcaccagccgtaatgccaataagctcagttcctgaaaaagcaaagtttactgttagcattgttgtaaatactccaccccagccgttggggaaccagccatttttataaaaattaaccaatcccaatgtgcttgataaactttgctcaactgatcaatcaaagctgttgcggtccataatttattattagtatctacgccttgtttttccaattcatacgacattgcaccatctaggactaatcccctatttttaatctgttcaagcaaacccatttttttcatgctgtcaacattattttagtaaatttcctaaataatagccgcaataaactagaaccaagccacccagatatgatgacaccgcgtagaatacaagaccacgataatttttactcttataaagctcaactaattctgtattcatagtggaaaaggttgtatagccacccattactccagttcctagtaatgcataaataaaagtgttagcaccaattccaaaaatcaagcctaaaattagtactccagttaagttaataaacaaagtcggtgtaggtaaattagaaaatttattaccaatccattcccaatgctttttaccataattagtaatagcataacgaagcatagctccaattgatgcaccaattcctgcaagcaaaaaattcatcgtgtattcctttcctttcttactaattgaccaacttttttaccaattttcattcctaacatagcaaaaaaaaagccaaaaataattgagctaaagtaataaattactgcttcgattggcaaattagcctgcatattttttaaaacatcaagattaaaagttgaaaaagtagtaaatgcacctacaaagccagtacctaatccaactacaagccactgcctaatctctttagtttcaataaaaaagtaggtgaaaaacgctaataaaaagcaacctatgacattaccccaaaaagtaccataatagctgaagtttgcatttaaaccagcacgtgccataccaccaaaaaaggcgaaaatagcgatactaatgtaattaataaattttgaattcaaacagattcctcccacaaaaaaacgtctactttacccctatcggataaagtagacgtcattagattttactcggttaatggcgaacgtcatcgcctattcagttgacagttatcatcatacgacttttctgtttggttggcaagttgtattgtgtgcgtgtcgcaaagcgacacgcagtttgattatttaataaaaaaatttagtaacaacgtgcttgaaataatgtataattatttttaacgaatgtttgaaaggagcctcaatcttgacttttccatatgaagataaatttcgcatttactgtaaacaacaaaagaaactagccgattcaactatttctctagcctgttcttcaatttcaactttttgggattattattctggtagtttagatgctactgaagcaaatgtagaaaatgttacaactggagatatacgtaactttttagattcacttgaaaataaactccatatgaaaagtaatacagtaaataaatatcttagtcacataaagatgtattttgtttttttgaatgaatatggctacatcattacttatccattgctcactttacgtggtaatcgcttcaatcgtaagcaacactatgttattggctgggaaaatcatttatcagaattaattcaaataaaaaatattcatcctgaaactatcaagatgatggctgctattgcttgtggttttaagccaaaagaaattatgattttgcatgtaaatgaattgttggtaaaagttaaagaaaatgatgtcagagaatatatccaaaatcacactaattttgccaataacgataatccctatctgtttgctcgccgcgatggcaaacattacgcttctgattttaatattaacccaaaaattgcccctgaccgttcaatagtcggcatgccattaactacacataagcttcggatgtcttatgtctactctgttttgtctaattcaaaattaagagaagcggattatattgaaaaattacatctttcaatgaaaactttaaattactatcgtaaaaatatgacactctatgtagaaaccagtaaatttgaattaaaaaaataaacaagcaaaaacgactacccattttgatatagtcctactttagtagacagtacaaatatataaaattgtactatctatgaaagcaggactttttgtatgtctagaaaaagtaaatttagctatgaagctaagcttaaagcagttaaacaatacataagtggcgaagcatcacctgcttcaattgcgaaagttttaggggctggcaagactacactgcgccaatgggtatatgcatttaaagatcatgggccagaagcattaagaccacataaatataatcaaagatacagtaaagattttaaactcaaatgcatagctgcctatttaaatggcgaaggctcatatgattatctaacaaataagtttggtttgcgaagtgctgcacagttaaagcagtgggttatcaagtataatagtcatcaagaactcaaggactacaatcctattctggaggcttatatgactaagagaaaaaagacaaccctagaagaacgtaaacagatagtgaaatactgcaaggatcatcaatggaactacaaggaagcagctcttaaatttggctgcagctatgcccaagtatacaactggtcaaaaaaatacagcgcaaagggaactgacggcttagcagataggcgcggtcatcgtttaaaagaagctgagctatctgaaactcaaaggctaaagcgtgaaattgaacagcttaaaaaagaaaatgatattaaagaccaagagatagccttcctaaaaaaagtgaaggaattagaaaggatgtgtttgctggacagccaaaacaaagacaaatagcacttaaacaacagcagcgaaattctctttacagtttgatcaaagaatgtcaccgagaatataagtggtcaattgaatggatgtgcaaacaagccaatattgcccggtcagcctactacaaatggcttaatcataagccaagcaaacgtgaactaagagatcaaaagattcttaagcgtattaaagaaatagctgagagcaataacagcctctttggttctcctaagatgactttggctttaaacaatgagctagcagacggtgaggccaaaatataccgtagaactgtggctcgcttgatgtgcgtgaatggcatctatactagcaaggccagatttaataagaggtatcgctatcaagctgctagaccggaagaaactgccgaaaatctattgcatagagacttcaatgccactaaacccaatgaaaaatggtgcactgacattactgaagaaaaaattcctggaacaagtcaaaagatttatctctgtactatctttgatctatatgatcgtttccctgttggctatgctttaagcaagcgcaatgatacagccctagttaacgctgctctgtcaactgcttggaaaagagagcccaatagtcatgcaatgcttcatagtgatcgaggatttcaatttaccaggatgccttttaagcatgagctagaagaacatggcatgccacaatcaatgtctagaattggccgctgtattgataatggcccaatggaaggctggcaaggtttaattaaagaaatgcgagaagttctttatccgaaagcaaatagctatgaagagatggaaaaagcctttaaagcaagtattgaatactatattaattatgatcctcaggagcgcttcaatggcaagagcgcaggtcaggttagaaaagaagctaagaataatccagagaatataatttcatatccaataaaacaagataaaagatataaagacttttggaaaaagattgatgaaaagaaaaatcagctcgcacaatagcgaactgattaatcaaattaatttatatatttaagctgtctacttgacacggtacggatcatttcgagtagtcgtctttgtttgttgaaggtgaaatttcaacaaatctatcttagtcagaacttggagttatctattagtaccagccatttgcttgccagaaacttttagcagcgctccaagagccatatctagatttgacataattatccgctacacgttcttggttagcagctgaataatcaccattcaaataagatgaagaaagttgatacttacctacatattggccatttctagcactgtatgagccaccagattctttgcttgcaatccatgcctttgcactagcttcggaacctgtcgcggttgatgaatatgaactagttgttgtcgtcttaggtgtgtagttcacatttgaataagtgtatgaactttgactttggctagcttgtgtagtttgttgagctggcgtttgtgtttgagtgtaggtattttcttgtctagcttgagtattttggctagtagtataattagttgccaatacccattgatttaagccaagatcataccacttctgtccctttgaatcataagcagtttttataatcttccagttagtacctgcagctagagtttgaccagttgcaactggattttcatagttattgtaaacggtagtagcttgtgtagttgtatacactgctgcatcattttgcacaacggcagcttgtgcttcattattatctagttgattgattgcaccaatacctgcaagtgataaagcagcaacagcaatagtcttagttaaaatagatttagttttcaaaaaacatctctccttaaattaaaacgtcaattactattcatcatttttgttttattattctcttgcaattgacattttatataatacctgcttcgagttgcagttccatcacagtcagatcacacaatgattaaagaaaaatgttttttcgtaacagttggaaatatttttaataaatctagatttctctgcaatatttgtaaaaatcatgcaatattgaaattttaaattaataagcaaaaatggctttcactgctataaaaatcgcccaaattaactcaatgggtttcaattgcatgtaaatattttccgtactttttccgtaaaagtcaaaatcgcccacagctacactgtgagcggtttttgctaggccgatcgaccaaattaatgaatcatccaaatccaagtttattatagcacatcttaaaagcttattctgccttgccagtcaattggctggtaatagcatttgctaactttactttgtcctcaacatctacaatcgtagtgatgtcggaaaatgcagggacgttacatgttaatattaacgcgttaatattaacatgtaaagcttttttgtaaaaaaatagagctacccgaaagtagctcgtgtaaggtaaataaaatacgtaagtattctagtccatgcgtaatgggcagttatattttatcttatgtaaagcgaaaaaactacctataaattcaggtgactttacaagtaccaaaaaagcttatatactgaatctaaccatatagacagtatataagctttaatttgccactagtgttactccctagtggctttttttataagttaatgcaagttttcggagaatttcatctaaaaattcagacggcacattgcacacatacttacattctctggctctcgaccgagaatcaattgagcgttcatgatctagctctaccctgccgtgaactggcaagctttctggaatttcaacgtgtaatggaaattctttttcgttagtagtaatagcaaccactttgatcactcctccacacatcatattgaaatcatcgtttgacacgacaagcgctggacgatagcccgcttgttcatgtcccttggttgggtcaaagttcatcatgataacatcaccttgatggaagtcttttctgctgttcaaattatcacctcccttctaataaggacttctaaattaaaagacttcgcgcccaactggtccgccccagtcctcttctttggacttgccaggattttctttttcccagtcgctccaatattttttatagtcaaagcctttgaaaagctcttttaagctttcaggctctttttgttttttcaaaacgatttcattatttttgttaactgttacatcaaatttggtcggtaattcattgatgccggctttgcttaaaatagttttaggcagtcgtacggctagtgaattgccccattgtttcaattccacattgcacattgttataaatctccttacaagtcttaattaaacctttttatttagtatatacttttgtatctacatttgcaataaaaattaaaatataacgcaaaaaagccaccccagaggaacaatcccccgaggtggctttatgcacgacatttggagcttttacaactccttttcttttttattatggataaaattacggataaattatagctcattatggctatctatccatctttgtaaagtttacagcacgatatacgcacggttgcccgtcacatatacctgcttgcctttgtgtagctctttaatctttaaaaagcgtccgactcttccctggatctcgacttttgagttaagctccaagccgtaaaccttgcctgcgtcagcctttggagcgtctagcgcatgagtatgaggtaaaacaaccttagctactgcatgtttgctgtcgttatatgcgatagggttagccttcacataaacggcacgaccatcgaaaaactgatttttgccaacttttacggcaccgttttccaatccgaacacctgccacatggaaccacacggttttagcttgtcgctttcccgcttgtccagtttggagcttgtgtaaacgtatgctccctttgaattggatactactgcgacagcaccgatattccactttacaacgggatgcagagacagcgattctccggtcttgtttgttgatttaggcttagaactggttgaactagcttttaaatcaactaaacaaatattaccatcaacgttgtaacctttgtaattatcggtaaattgccagattgcaacgccatccattgatgggaagtaattaaagtcagcggaatcttgacgacccatgactttatatgaggcaacccacaaacatgttccgaatgactttacaattcgagctgtgttaagacgattacgcaaaacataagcaccagcatagacaagcggtttatatcctgcttccttgatcacttgcatagctgctatgacagcatcagtgtttgaaccaacagagccgttgacgtcgttgccacttccctgctcccagtcgtcagcgatgtagctaccagctgggacgccataagccttagccttttctacggcatacttagcttctgcccgtgccagtgacacagagttagagtgtgtagcataaaagtagccgccggttaaaagcccatgagcaagtgaactcttgatttgagcttttgcctttgggttgatatagccagtaccctgtgtaagcttaatcaatgcaaatttaatgccggcgtagcttacgttttctgattggtagctggcgacatcagcacccaaacttcgctttgatacggttaagtttgacatctttttcaccgcctttcgtttggtttcttttggttatcttttggttttcaaacgattctccaaacgattcaaaaacaaattcgttgtaagtcttagtctttggcatcagaatcatcaccgcttgcaaagccgattggttgagcattgtcatcttcatcttgtgtagccttttcttgatcggcttgcatttggtcatatgcgtgttggacagctcccttggctacggattcggtaaggggcttgttttccttttgtgcttggttcagcaaagcttcaaccgccttagctttcttttcagcacctgaaatgtcgagcgtagcggcttcacttactacgaacttggcaatctggtcaatggtcataacttcctttggtaaaggcttctttgacttagacgcaaagaaatcaataccagtagaaacaccttgacatacagcgacaaaggcaagaaatcccacaaaaagatattcattaagttggcttaaattcattagtcagtcaccttcttagttaaaaaagaagtagtatctggcttattttctacttgtggtgctggtgtagtgctttcaggatccttgaccattgaatcgtctttgattcctgcaaagtaccgcacccacttggtaacctctgccttgatgtcttgtggtgcatcgtcaacatttaaaacaccgtcttgcaccaaggcaacgtaatctaaaattctagtgtttggcttcattttcacttaactcctttctgagtttttcattttcattgagtagttttttgttttccgcgtttaaacgcttattctgttcaacaatgtaatctcggttattctccacgctatccatatcactttttttaccgttttgtttaaaggtaaagtaacctaaaagcaaagcggataaagccgatataatgctgtttaggtcgacatgcactatatcacccctaacgcttcgaataatgccttgctgtccagataataaaggctataatcgccgtatttgacaaagcattctggacaaactccatttcatgggcaaaaatcacgtgttcaatttcgattgatgaaattattgctagcagcaccacgacaagtgctaacaacacccctagaagtttattgttgttgtaccgtgaacaggtgtaaactagcaacgcaacgcccacaatcatcattgaacagtctaagtaaacattgttcatcatccacgctaattgtggtggataaaagaaaaatctgcggttaagataaaagcccaaacctttaccgaaaatcagcagactaatgatcacgtaaagtgagttattgttgaggcgttgcagtagctggcgcataagcttcgcctacaatcttttggtaattttcaactgataagaaaccttgtactactaggtccttcatgccgttcttatcatagatgccgaattcccagtccatacgatacatttctaaaaagtttgcttgaatttgttccattaaagtcatgatttatgtcctccttaactattgcttatcagttgttgggttagctggtgtagcgttattagcatttgcgccaactgccttggttaccattgctaaggtcttttgcatagcaccaagaatttgattagtgttttgagtttgttcagtaaagctcttcatcaaagctaagttttgcttagatgattgagcttgaacttcttgcatatctcttaatgcttggtctaccttatcgttggctttgtcgagttcagcactcttcttgtccaattcagccagcttttgtgtagtttcttgcaagataacggcttgattgtccttgtcgttctcgctccaatcagtggcgcccactgtccaaactgggtctttaaagctgtcagatggtctttcggcgtggacttgccatgggagcgccacacttgcttcatcgccaaaaactgggattactttgtgatgccaaacaggatccgcattgtcaggatctgacaagtagacaaagcctgtaagagttgggaactttgcctttaatgcctgttcttgttcagcaacactgttttgatcttgtgtagcgtttgtttcggcgcccgctactggtgcaacttgtgtattttcgtcagccattttattggctcctttctatataaaaagcccacgggaacgccccgtgagcaaggttgttttttgtataaaaaaagcactcaatgagtgctataaatcctctctcaacaaatatctattcataatatccgttgcttttatgtaagttctatatattccatcatcagttcccatattattaatccaatggctaaaataaacactgtaataaggaatattttggctacttaaaataattccagtaatagtccccgttgaggccaaattcaatataccagaaggtatatcgaaattatgtagcttactatctgaaatttgtacatcataaccagtaggatcaacccatgctacctgatatttttgacgagtaacagttttaccgattaatttcaaatttacataatcatcaagtaataattgttgtagataatatttttcacgatttaaaagaagatgatcaatcatagagccacctccctaagcaggtaaagaagtgatctaagtcgttgatacaaacgaataggaaggaatttaccccccaatttacggattcaacgtcacttgctgaaacgcaagacaaatatattggaaatgtgtctggcaaatcttcccattgcccattacgatttgcagttccagttattgcatagtaattgttagccgtgccaacacatctaaaggtagatctaccaattgaaatagcacttccattagcgccccctattactccgccttgtcttacggtcacagttgctggatgtgggctccatgttttaccattggcaacaattgaagtatcactatccgaaatttcaaaccacttttttgtattcaaaattagatggtctagcatgctttcaccttctttctattacttttcaatcatagccaaccgtgtaggcttctcattttcccaggcttgggcttgggcttcttgacttgctgggaagcgacgaccctctacgtagttgtccttaatgtaagttacattgttgattaaatcgttaatctgcttttgcttgttaacattgtcttcctttaaatcgttgatctgtctttgcaaatcgttgatcgttggactggaaatattaccgctagcatcaacgcgagctgcctgtgcgccagtgctattgcgaattacaacggcattagagttatcgtcccccagctggataaccaggtctaagttgtcgttagcatcgttatctgcaaacagtctgacattatcagtagcgccactccatgttaacccgccaatgttaccgtcatgcgattcaactgcgcccgcgccattccagttgatagtactatgttccgccatgtctccaccagagttggacagtttgccgtttaattgtcccttggtccagttaacaatgtcttgacctgcattctgatccatcagaatctgattgccgccgtgtaggttttcttccgtcatcttagttgtagcgtttgcgttagcatcaaaaccacgggcaacggttgaggtaacgtttacgttgccgcttccgtcaggggttaagccattaacctttttcacaaattgaccgacattcaagccatcgaccttggatttgatcatgttagtaatgtcatcgttagacaacgtattacttggtgtaatgcgtgtccaggggaaccaggctttggtatctccacgcatcccacgtgcaaaaataaccccactcatggcagaaactaaaatttgaatgatagtattagttttaccaacgtcattaattacttttaagaagctgttttgcaaaaataaggaggccaactgtggtctattagcaaaggtattcgcattcttcggcatgcgatataaaccggactcagtcagattgtttaaatctgtcactcctgctggaatgtccttaatgcggtcactgtcaacgatcaagtcaagaatgccgtccttgtcgggttcaacaaccgctccgtcgttgatctttgcacccttaaccttgcccgcttctgcaatttttgggtcatactccgctttaagcttcaaaatagctgcgtctaaatcttcatcataaactacgccaatttgctttacactgatgttaattttggcagctgcgccgagtttaaacgcaacgccaagcttgattagctgtgttgatgtgtgatctggcgaacctgctccaagtgttgcagtaccaatagctggaataattgcgactaaaatttcttctttgccgccatcaatggttgcgtaaagcccaatcgacttaaaattgatatcctcatttaaatcgtgatttgaaaatgcaaattcgatgtctacttgtttagtttctttatcaaccggtgagatgtcagccaccttaatgccggttgtcatcttttcgccagctaaagaggtcaaagccctaatttgttcatcggtcattccgcttaaatcttgcgtataaagtgcggctttggtataaaggatttcgcctttacccgatccgagttttgaaaacaaattacgccctatatctgtaactagcgcctgattcatttttttactagtcgttgtatccatagtttcctttctaattagctatcattttgtaagaaacgataaccaatggttttgcaccaatgtaagattcacatggttgttggtcttgccaacctgtccaccacgtagttgttacctgatgcatatttacgtcttccgctgttacagcggtagcaatatattctgtgttctgttgcgactcttcccagccagtccaccagctggaaccaacatcaatgtttaaatccgtttcatcaattgaagcggcaccaatgtactcggtagttgtaacatttacataaaaaacaatctcatcaatccagtaacccattgccaatagattttgaatgttctttatgataaatttttgcatttgaagtgtttgcacattgtcccacggtatttcgataccaacatgacgaaggccggttttatagactttaaattgttccggctttgcatctagggcagttcccagaattttaaccattgatggtattgtgccttgagccctagaaattaaaatgtgtaaaaaaatgatgaaacggaatgtttcatcatcatcactaattctataagctttgtaatcttgcccgattaaatcaagtgttgtgccttttgccttgtcaatgcttcgccagtctgcaattttttcgttttcatcactgatcttttcaagcagtgaattataactgtctagcagctggtaaaaaacggtatcttttttcttgttccagtggtcggctacttccgcgatcagctgatctgttgtctcataagccaattaaatcaacctccacattttcagggtcacaatgagcaaattcggaacgaccaattaaaatattttggtctgctaatttatctttagtactaccaattacaatggttgcatcatcaacaccgttaacgtcataggtagcagaataaagacgggtaaaattgaccctttgccccatttcaaggaaattaatttcgtcgcaaatagcttgcttgatgtcatcaacccccgcatcactgttccagtcgtcattaattgaaacatcgacctttacgtaaatgttatgttgttgagcgtggttaaatttaacttctttaacctttcctgttgcatctggtgcttctttaacaattgagccagctaaggtgataccggccgcacatttatcaactaaagttttagcgatttcatcatcgttaccacctaaaacataaatgtgaactgaacattcgggattaccgtattcatccgtcttatacttgtcgttgtcaataaagccaacttgcttaacgccgttgaggttcattaatgccgatttaatacctagttctgtaggaccaggacgggcgacattttccataattaaacgttttctaaaggtttcatcgtcttcataatcttgcccgccgcctgcaggctgtgggttggttacagagataaagtcttcatctgggttggcaaacaaagtaattgtgttagctggtacattagtaaattcgccagtttcttcacattcaacgtttccagttccttgaaaagtaccatcatcttgctttgaagtgatgacatcctcggttaaatcaaacaccaagccatcttctgtttcgaacttttcgccagcctgaattaaatactcgccttcggtcgttatcacaacttccgcatgagatggagcgtcaactttacgggtcaaactgatattgcccgctaatcggtctaatgctgaatttatagcggttgaatagaatccagaatagtaaatttgttcctgttgctgaattaaatcgtaagcagcatcactcattaaacgggcaaaaatacctagataggcattacttgttaacgcaatgtcatctccaagccgcgttcgaaaatcgtcttccacaccgtctaagatttctgcgaaacttggggcaatatagcctgtttcttttaaaccaaaatcagttgtcaacttgtaaccccccttctacttcaccaatatttgcggtggctctaaaattaatctgcatttttctttcaggtttcttgataaattcgatattatcaacggtttcaacttccggtacgtttgcttcaatagccgctcgcatatcattctccgccgcttgtttattgaagtttttacctaaaaagctgctatagtctgcccccatttcggggtctagccgttgcatttcaccataccgaatttctagcgttgccttaattctttgcgctatttcgtcaagaccgctagtcatttctaaatcgtgagtaatcggatcaataactaggtcatgattatcactcataaataagtctctagccatcgtcgtcacccttataaacagaaacgataattgagtcgtttgcatcatgcatcctgccggtatttggcgtaaaggtgttcccagtgccgtcccagttatcaatgtcacggtccatagtaacggctatcactacagcgccaactctcatagacttctttttcggataatgttctaaaaaatgtgagttaacttctgggctactatcaacggctttaaaatctgacttaaacttatctaacaattcatcaagcctatagcaagattcggcaaccggaacatctaagtactgagccgatttagtgccatcgatccaattcgccagcggttgaatatctgcaatgtgttttttcttgtcgtaagttaaaactttagctaaaaaagcagattcaagacttctgctgaatcggtttttcaccttactaatgttttcataccatcgaattggaaccctatttttttgtttcatactgtcatctccttattttttagatttactttttttcttgcctttacttttagattttgttttatgaccagccttagcttttgtaaccgccgcaatagtgcattgagtttgtggactttcgccatcaaaactatgctgtccatttttaacgacaaattttccttttaagaacttagaattcatgataatgccggtattaacggtaacttctgggactaagggcgtaacaatttgccaagttgtcccgtttttatcatcatcgttttgcgatggaacttgaattaagtctttatcatcaatcacaaaccaagtatttttcttgctattaggattgacaattacgagcttgccacgttcataaaacatttccgattttgctaacttaacaaagtttttaatcaaggttagcggcttgcctttagcagtaaaggatttttttatcccttcatttttagctaaatcgattttagctattttgataccggcttgttccgctattccttcaattacttgcttataagtcgttccttttcggtaaactcggttagcaaaataagtcttattatcacggcttttaacccttttatttgtagtttttggtttaacccatacttttcgataagcccaatggtggactacatgtttctgcccttttttaggacctctcttgtaagtttcaacgaccgaggtactataacgctgattcttgtaatgacctttttcagtgcttttaacggttttgtagtgattaacctttttattcttttttagcttcaactttcgagcagctacattgctgtagtttgtgccttcagtaaaagttaaaactttactatcagttgtcccatcattgcttaatttacccgtattagagataaatccttcagctatttttttaggatctttaccccagttaaaatttatccagcagtgcatcccttttttgtaaaagtctttatgctgcttagttaaattaaaaatagttaccgtaaaagtagacggaacaggttcgttagtaaaaggaacttcaaacgtaaaaggataattatgttcgtaagtttcatcgttatatacgatttgcttgtgtcctttactatcaaccgccacaaattccatatgtgggtctttagtgacaatcattagtaagacacctcttcatccgttaggtcatcatcattttcgttagggtcgtaacctagcggtttaattgatgggtcttctgtttctgatccattcggatcaacaacgtcaagatacaagcggacctcatatccaaatgttcccttgccttggtctgttgccttacccgtttcgtccatcgtgcgaatgtcaattcttggcaattcgggatcaggaatatcaataccaactaattgaccaagcaaaagaggctcctgcgttaggagtctcttgttattgtgccaaattgtaattgtgtagtaatccgcaacttcgttgtaatctactctcatatcataggtatcgcctacaagggttatttgaaagatataaggaatatttttaacatcaacatcaagataatttctcatctaaatcaccacctacgcaacccgtattttattgccaggatagattaagttaggattcttgatgtggttgactcgtgccatccattgaacggaactgccgtatttcttagacaaagcccacaaggtatcgccagatttaatagtgatagcagtgtactttttatttcgattacctgcgacggatttagaagccttagacgactttctgtggtgcttactatcgtttgaagtggtgatttttgcttgatagacaaattgaaaagtaagtgaaacttcaatgttatctcgaagattcttatagtcgttgttcatatttgcgattaagtaatgcttatagcagaagtcccctcgataggttaaccgaacatgtgaactattccattgactaagcatgtgccatttacggtatgaatcggctttatctttaccaacaatgatgcctgcaactgttgcgcctttactatttacacgagcatatgagctatatggtgcgccctcatcaaccggataagaagtaatgtttgaagaaacattttcactttcaccgtctgccggcgaaatataaataatttcacctttgccatccgaacggtaaatagcacatttaccttcattcttccagccggtgttgtgttccgcaatttccgccaatttgctacttaaatcaattctttgcgtaacaatacggtcgtacttgtctttcgcttttttataattgttttccgcttgctttttccttttatttgcggcatcaacaagcttcaaacaattatcacgttttcggataagctttttctttttaatttgattcttttcaaaatgtgaatcgaagtcatagccctgcgcctttgaaaacatttttcggtaaacggcgccttcatgtttttgccgcttgtcccagtatttcatagagtcatgggctttttgttcagccgttctcttttttggtttagttgcttgaaccattagcatcaccttcatttctataagaaatcgtcatcatcacccgtatcatcgccaatatgatcaagaataatatttaacttttggcgtacttgttgatctacctctacgcctatcatcttcgctaatttttgcaatttagcatcatcgccatcaacgttgccgttaatatttacggttacttgaatgccacctaaagccccgccagttcctcttactgggcgtacttttggcttagatgaagttagtggctttaatctttgccgcgtcttttcatttgagtagatgtgaaccgaatctttaaattcggcaagctctggaccgtgttcgccaactaaaaccttgtcgccaacgacaggatcgccgcctttagcgtatccaagaactttgcggatctccatggcacctttgacgtgttgagcgttgtagccgccacgttcccattcagatgaaaacttgtttgctaggctggcaacgctaccagttccttccaaaacggagcgaagaatagcgctgtctgagccttcgcctttaacggcaaagcttaattgtgtgccggcgtttttccagcttgtcccgtgatgtctagcataagcaattaagttagacttacgaccgccaagccattgacctaaaccggaagcaccaccgctgctgttaactgcaccggggtttaaaccacctgattcaaaattccagttacccaaaacggctgcaataccattcttggttgctttggggtcaagttgcttcaatccaccggctagggctttagctctttcagctaagtcaccgccaacactaaatgagcctaatgaaccaagatcatcactaagatttttcttgatccaactcaaagcagtattacctaattctttctttgcaagagccatcaagtttttatctgctgttgctgttttcttggcttgactggcgttgtgtaagccacgaacacggtaatagccgtagcccatccccttgtcgtcagcaatcgaagtgacacgagcatgaggcggagtttcattgaacattgttccggtgtgtgggtttttgataattcccacgtgaccagcggcacctgttccatggccaaagataaccaagtcacctggaattgtcttagataacgacttacctaggtattcaacacctgagctgtgttgcattgccacagtcgtgcgtccaatatctacgccaaagtgacgtaaagcttgcatgaccatacccgaacagtcggatagcgtcttgcttgccgcgcccatttggtacttaacgccactgaatgttgattcagcgtactttaaaaatccttcacgggttccgcccttgccattagctccgccaattgcgttgttaatgacggcccacattgcgttagaccatggattacctaacttagttgatgaatttctagctaaattaatagagccttgtcgtaaatctgtaccacttgccttaatttttgaagtgtacatatcagcaaaactcttagcaggattatttccagctgtctcagcgatttttcttagtctgctatgacttacgccagagcctttcgcaaaacgctgtaatccccaataatttgccaattcttgtgtttgagaaccattgaggacagaatcacctttttcaagtggcaatatcctgttattccctcttggaatccaaatatcaccgctatttttgataattgcttcctgtcttggtccaattgtcgcatcattgaccattgccatggtgttttgggacaaacgcccatttgaacctttagcgaacttaactggcttgatgactgacgtgttaccaccaaactgtccaagaacttgatcaattcccttaataccagaattaacctggtcaattgtgtcgcccattgcagaatgagcgtacttggtcatgtgacctagctctttaccaaagccctttgcagtcgtagaagcaagatcaactacaccgtcatgcatcttgtccatttgcttatgaactcctgtccgcatgtgggtgtattcgtctattgccccttttcggctcttctgggcttgttttgtggtagtgcttgtaatcttgcgccagcttgaattgctcttcttagtaagatcattaagtgacttggacgacttagaagcaatctgcttgtagtcatcagtaactttcttggtagttttaccaaggctagcgttgccgttagcatatcccttgagctttaatccagcaccgagaccgccactcataacctttgcggtgtcgcgagcgttgagaattttttcacctgactggatatttgccaattgcggacctttagcgccaagcaaacgagcatggttggaataaggcttgtaagctaattcgggccccgcttcaccaactaatgaagcagtaccgttagcatgagcgcctaagtgagtcgagcggttaatgtcagcaatagtagtagcatgtgacttgctggcgtgatgtttaccaccttgtccgttttgcatggctttaacggatttgttagcacttgcaacactggtgctattttcaggtttctttgtcttccagtctttacctgacacaaaatcccaaacatttttgacactacttgcaataccgccaataactgagctaaacatgtctttaagaccggatagcattccagtaaccatgtcaatagctgattttgcaacgcccttcatatctttccaagctttgccccatttccagtggaaaatatcagatattgttctgacaacccccgatgatattttgacaattcctttgatgttggacgttacaattttgacagctccgcgaacaatgccaataccagttttaatgactgttgcgccttgtttaatagcaagctttaaagaagccatcaatcctgactttaagaagttcttgaaattcctaaaagctttgttacggttaagatcgcgccaatctcgaccaatgtcacgggtcatgctaccaaatgatcttttgacacttttaacagtgccaccaatcattttgcccataccagcatcatgccatgtagttttaatcgaccatgcggcttgcttgaaggttttaccgacagatttaccaaacttagtcttactaaatctgcgagccatgtcgccagcccatttgccggctacttgccctaaagtagagccaatagccgcaccagctggaccaccgagatatagtccgacaccgccaccgattgcggaacctatagatttaccgtaattttcaaacttctttttagggttctttgtggtaattgctttataaagatcaataccggagttaagggcgataccgccaacagcaagggcagttgcccctgtgcttgcagtaccacctaatttgccagctactttgctacctaatccggtttttgcgagtttaccaccaattaggttggagctgactttacctatagcagagcccaccccacctaaaagagatgggttagctgattcaccagcgccttttgccgctgttttggctacagtcttaccgccaatccccagcacattgccgactaatcttttagcaacaaaaccagtacttagcgctccagtaatagcggtgatatagcccagggtctttttaacaggcgcaggccatccttcaatagctcttaataccttattaacaaatttgagcatattggctaatcccggggctatttgttgggcaaactgcatccccatatcttttagcaacatctttgtcttagataattgattctgcaaagatgacatatttttattagacaagtttgaaatgtagtttgtactgtctgccctgtttgccgctctcacattattagcaacgtcacgattatttctagtcaaaattaaagcgtcgttaaagccagtttgaccaaataattgtttaaagtcgccggtaacacgattagactttttgccttgcgttgctcggttaagcatattgaagaccgtaggtagttgctttagattacccgacttagtaaagaaatcagcgggtgataatcctaaatctcttaatgccgcagtcttggttttgcttttagaagcgccaactaaacttgaaacaatttgacgtaaaccagtaccagccgaggtaccttcttcaccgaagttggataaagtaccaagagctgcaagtgatgatgaaagtgattgtcctgtttggtggaggattgaaccagccatcttaaaggaattaccaaaaccaccttcaccgccaacttgaccagatgtcacgtcacctacataggccgccttgtttaagacttcccttgtgtagcgtgccatctttttagtactgttaccggctcgcttcttatacccgaactgttcaagcataggagcggcggcattaacaacggagttataatcttcttttgttgcttttgccgcttggacaaagtacttgtgcgccgctaagtcttgattaccagaataaccacgcctaattaattcttccgaaccttgagcaagtgaattctgatcgacgccgtactttaaagatagattgcggttttccctttgaatagccgccgtattctttttagcagtagcggcactatctccaccagtttgctgcaagttcttaattacgttgtattcatcagctagcttagtggcttcatcatttgcattcttaaaagccgccgcaactgggaccattgccgccgcaatgcctgttccaacggtaattaattttgaacccgcatcatgaagcaaattaaagcccgtagttgcacggtcgctggctgatctgttgttttttagcgtcccatttgtcttctcaacagcatcttttgccgtattgaagccacctgaagcggtgtttgcagaaacgccagccttccaaatggtgttagataaaccgcccatagttttagcggaaccaccgacgccagcaatcgaagactttaattttacatttgcatcaattagccgattagttgaattctttgtttcttctaaatgctttttaacggtagctgttgtttgaccacttttggtagccataccaccaagttgcttttttaagccagcaactgtacgacttgtctcctcaacggaatttttgtttctgttgaattgttcagtaaagtcaggagcctttaaacggtcaaagcgtttttctaaaacaccgaggtcagaaataaactttctagttgttttttcagcttcttttagagagttatattcaacgtttgtattaattccaatccctagatgttcgatatcggccacgttttcagctcctttctttaaaattcaggcaaaataaaaacccatcaatttaattgacaggcatcacctctatttatcaccaccgccaaacaattcaccgatatgatttgcctgactaatacttgttgtttctatgtcccgttctactacctttgccataatcaataattgatctggtgttgcatttttaacaagccgttctggaattccatgcattatcaaacgcaaaggaagttcaacataatcggcttgtctttcaatttctctattacctagtttctgtctagagtttttcagtaagaaaattcaaaacagcttcggcggcttcataaagaccttcatgatcgttccaccacttaattgacttaatctttggttggataatcacgtgcttcaagctttctctcagcaattccggacgattaattgcgccaaacgggttacgggaattttccagaatttcagttgcttcttcaactccagggaattgaagctttaattgatattcttggtcagtatcttcacgaatggttacggttttagaaagagcagtcaaaggtgtgaccttgcttgattccgcttcttccttaatcttcatttgttcttcgtgcgccttttcggcaagctttgcgttattgatttcttcactcattattaagtctcctttaagttaatttgatttcatgaaagtctcttgaaaccttcgaattaatcgctataggtcatgttcgaagtttcttccttgttaagcattgtaataggccagttacggtcaccggcttgtgcgccaccttgcttatctggaatcttgtcaattgatgcataatgacaagaaatgtgtgatgttgagtcaatgatgtcaactgtgaaaaattcatccttgttaaacaagtctaaaagataagcattgcatggagatgtttcatctaatggcaatgtaaagcccgccatagtcttgttattgtgcgatttagtagctgatccttgtggatcaatcttgtacgtattcgcatcagttttatcagtaaccgtaaacatgctattttctgaaaatccatacatcaatttgtcgttgatcataatggtgcagtcattagcatcatattcacgcattttcgatgttttaatctttgaaggcatttaaactcccctttctaattaagcagccatgatagtgtctgaatcgacaacgccattaacggtaatagtatgaatagcgcttgaagcatggtattcaaagctagcgccgtcatagaatctgtctgacaagcgttggcgtgattgctgactacgtggagtagtagtaacgctgaacattgggcgaccagtagtgtcgtcagtcatgatgattcccttgtcgtacgcttcattcaaaacttgtgttaagactgcacgaatcatggcaatgccttgagcttcgtatggaatcttgccgttatcttgtaaaagtttctgcaagcggctttgacattcggtttgaacccacatcacgccgtgaagcaagtcaatatattcacctgataaggtagttccctctgaggtttgacctttgcccatcatttcttcataggcaatagcatgaatattgttaataccagccaattcttgactagttaagttttcaggcgtaatgccttcaagctgcttaaacttccaagtaattgagccgacatcgttaagagcaatgccaccgacaaaagcggcgtccattgactcattcaaatcgtgcttcaagccgatagtgtagttttgccccatcatttgggtgtacttagataggtcttcagtttggagaactaagaagtgatctttgtttacttcaaagatgtttgacaattgaacggttgaatcgtcaattgtgttgtctacacatacgccaaaagtccagttgaagtaccagaaagccttcaaactatcgtaagcctttgacttgtcataatctaagacggctaagcggtctgagtgctttggctgagcaaagtaggctgtagcctttttgtaaacagccgaatcttctttgtagtcaactgccaccgcatcaaggttcttatattcacggtaaattgccccagtagctgggtcagtcttacgtaaaagcaaaccattcaagcggtcggtgtttgacaaagtatctggtaaagtctgggctggtgtcttttgtgcgctcttgtcgtctttgccagctgaatcactgttagcagctgcagtagtagcatttaacagcaaaatattacctagccccttaattggttggggatgtaggacagtcataatgacgttcacatccatagggcggtcgtaaggggcgaccgtggttaatgttggcattaaagttcttcctttcttacgtttatttcttttcctgtcatttgattcatagccttaattgattcaatcgttgtttcattgaattcaaagttaaggtcttccggtttatagatagttccagcacggtaaatagaaaacgagcaatcgaaaccaaatctataaacgggtaattgcgtgccgttatagaaatctcgagggctcgttcctgatacgttatgtggaatcacatgtgcttgtttaaaaaatcctctatatccgtaactgtgcgctaatgtcttgcgtaaatcattggccgtattcaaggcttcgtacatgtcggttgcttgcacatcaatttgaagtcttacttccatgacatcagtttcgtctaaagtaacgtcacttccagggtctacccagtcataagtaataaacggataattgctacgcaaaccggcattcatttgcggatatacaccgcaatgatatttttgattaactacctggataagttggtatatcactaggtagttgtccatcattggtggcatttgggtttgtgtcatcctgatttactcccttcaattggtactcaaaaaagtgtggattcgtataaccttcataagatgatcgactagtaactttgtagtagccgccttgtgtcggaacattgaccacactttcaattggatatttattaattgataaccaaagtaaatcgccttgcacttctccgccgccatctaactgggcgaagagttgtgcaaggtgacttgacattggtaaaactggctcatgaagcttttcagcatcatcatcgcttaattgggaataatcaggggcatcagtaggtgcgccaggatagcgggggttatagaattgccccgaactccaaactttaatgtctacaccgtacttgtgaatcattcttgccggattcattttgtgcattagatcaacccccctttctaaatcggaactatcatgaactttacttgtctttgaagctcacccgtatcgaccaacggattgtctgagcctttacgctcgatagtcgctggtcggttctttgggtgcttcaacttaattgatgacatagcgatgtcggcagtacatgcaacgcctagccggctaagtagctgcttacccgttgcttcacctgctagaacttttgcaatatatctccgcactaattgtgtgtacttccttttgttagctaaataagcctgccgaataaacgggcgggctggtatttgaacaagcttactaagatagaaatatgccactaacttgccgtgatcgttaacgcatgctactcggtgccctttaggaataaacaagccttcaatatcttttgggccttttcctttaggacagtctttagtaggaatccatagccactcgccatttttaggcttgattgtggctccaaattcgttagccccaacgattgttagtaatctactttcacgttttccaaaaaaaccaattacaacctgatgcgtttttaagtagtcaagttccttagttacttctggaatacggttataaccttcaattttcatcagtgttcgattattctaatttttacgagattgccgacataatttttgtacagcctccaatagagctgtccccatggagagcgttgtaaccacttcaagcagctggtatcagcatagtggttttccaaaacatcgactttttcgaaagtcattccgctacctgccccgtcttgcgttgctaaaagatgcaaagtcatagcacgggtagccaaatcaagggctggcatttcggcaccatgaagctttttaactttagggaacccgtcagaaacggcaatcattcgggcattttcaattaatgcttcaagcgattcatcgggtacgtcatcggtcatgcccgcagtatcaagctttttaattaactctactgtggtagttgtgtcattcatactacttagcctttgtcttagcttctgcccatgtttcagaaccatcattcaagccggttaactgaacaattgcggctgggaacttaactgacaagccgcctgaacgttccatgtacatttgtttgtagcttaatccgttgtcagcggatggaatggctgtgccgtaacggcgtggttccattgcaataacaatttgtgcaatatcaggagtatcaaggtaaacaatacccatattctttttacctgcttgtccctttttgtcgttccaatactttgcttcaagctcggtaactggtttaattccagcaaaaacaccatcgctgttagctccgttacgttggatcatgttccataaagtcttgtctggattgtattggttaaccaacggacgggttaataattcgtactcctttggtggcaaagctaagtaaggcttaacgttgtggtagccaggcaacaaagtaatctttgaagcggcatccataaagtaattgataatcttgtaagcatcactaaatgcgtccttgttgttaggatctactaccttttgcaaggttacgcttggatcatctaaagtttgataacctgcggtttcagcattagtagttaaaccgtaaataggtctttgtgagtcgccattaccgttgaaaattaaagcgtcttcccaatttgctaacgcgtcatgagtagcggttgcacggtcggtaataatatcgatatttctaccgccggtgtgtgaacgctctaaatcagcttgtgaatattcgaatccagctgccttctccgcaacatagcctacttccctgtggtaagttacatcagtggtagtgatgtctgttgcacggtcggtgtagtctgatgcttggcccataatttctttccatgcccattcgtaagtaagtgcccatggatcgggaagcggttttagcttgaacattgttctaccttgaagttcttctccttttggttgtaaaacaactgggtcaacaacattgaaaagttcactataggcagttccagtattaaatcctgcttttggcattatttatcccccttcttatcggtgccggtagttgatgatgtaccggctgattgattattggtgtttgtatcagttgctggtgttgatagcttgtccgctgtggtgcctgtgccagtagtacccatgtcagtcaagttgacatctacgattgcggtaccattagcatcgcctgcagtgataaagcgaccaacaacgggctcacccggcttagctggtctaaaagtaccatcggcactaatagttgcttgatctaagcggtcaacgtcttcagtaattggaactgacacgctaccacggcgtaaagcgccaatcttttcacctttaagccagtggtcattttcaatgtcatcgtaactatgaccaattacgtaagcgcgcttaactgaaattgcatagataggtgccttagttgctactacggcttgattgtcttgaatatcaagagcaacaccgtaatcgatatcagtagcagcggtaacggtataaattgagtagtcctttaaagaaccgattgttccgttacctaattctttcttttgataaagttgtccaactggtaatggcattattcattgcccccttcgtataagttttgacgtgcttcaagcgccttttctacggcggtcttttcatttgaatcaccagcggtgcgaccataacttacgccaccagcgttagtactaaatagaccttcataaagaccacttacaaagtcgtcacttttatctgagtaatcacgttcgcccaaatttttattaagggcggcttcttcaacttcacgttcgctcttaccggcaaagtcatagctgtcaccaacaactttcttagctctttcacgaaatgctaaggtcttgctaatcttgtcttcgaatgcgtccccttcaagttgtgacttgagtttcttattttcttcttctgcactgtcggcgcgtaagttagcttcatcagctttcttcttagcgtcagcggcttctttcttgttcttatcgccagagccttgtaactccttaatttgcgcattaagtttgtcacgctctgcaataagcttttctagtttgctgttgctgtcgtcagcgtcaccaacaagcttcgttaacttgtcggcatcttcaacagcaacgctaatatcaccttgcttggtatgtacttttgtaaagtccatcttttcacctttctttttttcgttatcttcaggaatttcttctgcactatcagccgttagccttaccgagtgaccagcgcgaccacggtctacaatcgcaacatgattaattctgatattggtttgcttagcatcgtaggcttgcccattaagttcacctttagttggatcaagctgcatttgaaaaccaattgataattcttgcttgccgtgcctgattttgttgattaagtcactatcagttatggtcaaatcatttctgatagtcttggttgctttatcaacacgggcatgatcggacataaagcccttcataaatcgctgggaattatcacagttaaccatgattgtgttgccgtttgcgtcggttgggtggtcgtcagtaactggtttgttattggctgaatcaaccgtagcagctgagaacaattcctctggtgtcttagcttcttgaattcgttgcccatcgaattgacggtatggtcgtacgccctcacatgtgattggcacattcttgacgtgcagaaaccccgttattggatcgatagtaaatttatcgattggcgtagtagtttcatacctaattgcgcccataagctatgcaccgtaaggaacttcaaccggtttgttaggaatgtaaattgtttgaccttctttaaccttcatcgttgctttgttgatgtggttgaagtatctaagttgctgtaaagctacagagaacttttgagcgacatcaaacaaactttcatctttaccaatcacgtaaggcttagcgtcagaccaatcaaacattcctttagggtcctttgctggttcaaccggcttcataaccggtgaactggttggcttatcaataaccggcttggtagcactatttaaaagtgaacccgttaagggcttgcttgtactacctgctggtgtacttgttggtgtattatctgccatatttctggctcctttctgcataaaaaaagcacccttcatgagtgctaatcatctattactggcatcgcaacacaacggcaattaatcggctcacctggaagctgtccatcgtcaccgccatctggatcatcgtatctaaaaacttgttgatctagtatttggtgtttaggtctaacccgtccatcctccatggattgccatagatatttttcaaagcccgcatgtgtggcgcggtatttattcaactcggctaaaatactgcctgtttgatcgttagcaattagccgagcatggttatatgacatattcgtacgcttaacaattgcgttggttaattccgtggcacccttaccatcactaattgcgcggtaaatgtcgctttgcaattgggcgacgtacttatcccgcattgaagtgatgtacgaggtgttttccttaatctttgccttgataaacgcttgaatagtcggattgcttttaattgcttgtgatgaaattgccctagcttgcgcattgacattgctataagaaaaactatttactgacagtacaaattgagttgcaacattttcaagttcctgtttactattagaattctttatagccaatatcatcaacgcaatcaaagcggacaaccgctctattttgtgagggtcattttcatcatcatctgaatcaatcgacaacgctccgcctaacatgtaattcttcaaataatattctgcataccattgcgctttctttttccatgacaagacaagacgctttaaagcccccagatacgatttttccaagttcatggggtatcttgtctttgggattgttttacgtctccttgccatggttttttgctcccgtgaggtgtttttctatcttagccttttctttggcaaaagactttctatcttgttcggtaatgtcatcatcggcactatcgccagttaactgaattggaattgcttcgttagtagtttgttgaagtaaaatatcatgggcttcatcagtagtaagaaagccaccattaattgctgtggacaacgctgtggaaagcttaccaaggttatcaatcttttcactatcggtgagtgtctgcaaagagtagaactcgatgtgccaatctagtgagtcaggatcttctgaaccgccgcccacattttcggaccacatcagcaacttaaccagccactcaagttgcggcttaattgtctgctcttgaatagccctgatactatcgtagtaatttactacgtcctgtgaagcgccagccaatgtaccggcctgttcacccatcaaaatcgatttaggaatcccagttgcggtactaagttgttgccaagcaaaactaaatagtgaatcaataccgcccggcttatttgaaactttttccaggtcatcgtctttcccaacaactaccagtgactcggtacccatgccgcggctcattctgtgatcagttttgcgctggtcatcctcagacagatcaaaataagcatcgcttttccagactttcatgttgtactcgtaaagcattttgcctgttgagtacaaaccggtatcaagagttttaatctggtcatagcaccgcattagcaaagatgtacccgttgcatcgtcttccatcttgtccagcgaaatgtgtctatagcggctactgtcaattgtgatactttcaggctcttttgaattatcatctgagccatcagataggccctcaagtaccagcttttcttctttgccaaagttttctagcgttgggtcgttacaaatctggttagctttgacatgcatttgactaaaagcattgattgaatttacttttaaaatgttgtgcgggtctaatggctgttctaagctagttcggtgtttttcatcaacattaacgtttaaatatgcatctccaatgatatttctataaataatttcactagcaatcttttctttaggcaataatgcatctaaagccgcttgatagactacttgcttttcatcgttgttgttaatcactatccgccagccgtttcgagttgctgtttcagctggtaaacgggcgattcggttagctaaagcattagacttaaacagatggtcagcttgtttatagttgtattttctatctaaataccttgttgaaataaaagaagacgtatcaccgaatctgctgggtgttacgcctttactttcgtaatccataaagtcagcaccgattgtaatttgtgctggctttttctttttgccaaatccaaacaattaatgacctcctttctaaataaatccaagtgatattttccgtttatttttcattaggtacttaatcgcataagtggctgagtctacttggtcatcatgcggcatgttaggaaacccacaccattcttcaatcaattcttctgattcgggtttccatttagggtgcggtatatatacctgtcccgcttcgaagtacggtgaaacagaagcaaaacgggcttctttgctgtccgcccctggcgatactggcataattccaggtattttctttttcaaagtatcaagaattgcgggaccgtttgccttgtcttcaactaatttcgatgttgattctgggtaaagtgttgactggtacttaatagcttccagcgtttgtgtaaagcttaaccgcttgtggcaccaaccaggacgcagaaacacctccgcatcacgtcttgaccatgtttgacctgccacatagtcgtcattttctttagatttaaaggttgcatcccatgcttgaatggtttgctgcaagtgtcgtggcaaaattttgacttctttttcagttaagtgaagccgcgccatcgtctcacgatcaggaacatagaacttaatccactcacgcttaataatgttaccctcctgcaccgttggtgcctgctggtacatagcattaaatttttgagtacctaaattactcttctgggttagcagctgcttaattggatgcttttctgggtttaaggcttcaccattacgtctgcctatagcatcggtttgaccacttggtaaatcataagcaatagcaggaaacttaatttcttcccagtcaaagtccattttgtctagcagtctgccagctaaatcgtcggtactccacctagtcataattacgataatagaagcgttagcagatagacgggttgaaaatgttgaagtccattcttgccaaatattttcccttactgtaggcgattgtgcttcttttgcgtctttgatagggtcgtcaataatcaacaagtccgctggtcgaccagtaccaccaccttgaattgaagtaaaatacgcttcaccacggtgccctgcaacggtaaaatcattggaactatttttgccgatggtcaagccgaataatcggttagcccaatcagtgaaatgctgtctttctttgcaggcaaaacgagtatacatatcttcaccatatgacgttaccattacctgattttcagggtatttcatcaggtaatagctggcgaaagtctcagtcacacacatactttttccgtgttgtggtggaagttccagtatcaaatgtttctgcttaccatcaattatttcttgaagcttgccacaaatatactcgatgtaatcataaagcttggcgttaatatcagaattagccaataaaaaataataggcgtagcttctgcgtgctagttcttccctagccgctaacgctataccttgcctttgttcattagtcaattccactgatatcaactccttggtctaaatttgctaaacgctttaaggtatccatgtctaacttgctcatgctatctcttgccttacttgcagtggtatcaatctgttcaagttgtttctttaacaacttgttttgcaaacgagtttgttgggctttagcacgatttaaactggttcttgccgcttgatctcttaacttagtctgtcgttcaaggtaataaacacttgcttcggtatctttttcgttagtgatcttcatggcaatattcaattttgcccgtgcttcaagttcctttttccacctagcaaacttagcgacataacttggatgtctcttcatatatcgacgccacgtatttgtagagatttcaatttgttcacaagcttctttaagactacagccagcaataataaacgtttgaaactgatttaatttttgttctgttattacttcgggtctaccacccttatcttttgtagcttttgccaaactgaaatcaccacctttttaggcaaaataaaagaactgatttactaaccagttcaataaacaactttcttaatttgtcaattcttttttctttcttatttttttaagctgttgcttcttataagcttcaaagttccctgcttggttttgcattaactttaattgcttaatctgcgaagctaaatcatttaatcttctagcagcgttttctaaatcgtcagaactaagatagcttttattagctgatcttttaagatcatcaccaactaaatcaatttgcttctttaaactttgttcggatagttctaagccttttgtacctaatccacaaaccttttgcaataaatcgaattctttttcatcaaacatttttaataccccttaaaatgaaaatacatacttatcttgaactaacttgccgttaatattaagctttttaccgtgattgtaaccagccttttcgtaaacatccctgtctactaaaaacattttagtggagtattctttcccaccgatattattagaccttgtgcttacactaaccaagcctaatttttcagcaattttcttttcaacgtaagcgtgtgtggcctgctataattactccctcattgtccacaacgataggctgttgccagccaaattctttaattgaatttgctacagcgtcaaccgcgtcatcgttgtcacgtgggttattttcatagggcttaatttcatcaattgatttagcttctacttgcatgatttagcctcctaaacttttaagcactaacataatcgtcattaaacatatgaacacaacaataactgctaacaaaaacgatgagaaacgttcttcacacgagcgttgcactctatctaataatgatggaacaggaacagatttaatactaataaccttaccgttcttatctttagttaccacgtaagttactttctttctattcatttttgcattcccttaaacttcctttaccgttgttggaacaaactgcaaatattcatcagctacaaactcatcatctttagtaatataagttacttcaaaatagcgattagaaagttttgcttcatctttgcccttaaaatcatggatacagaacatagccttataattacgagctatatagctgtaccaagtcatctggatttttgccattaattcactttttgaaagatcagcatttaatccaacttctaaaaggtaatctgcaattttccctttagcaattctaataaaaagtgaatctgtcataggtgcttcttcgttatttttcatttcctaacttttcttaccaaatctatctaagtaatcttgcggcataaagcccgtttcttgcttaaatagaatcttctgcttgatgttagcaactgtattaattttgcagtacttaacaatttttcttgccttaactaaacggctatgtctttgacataactcaaagtaccgtgtaggtgtcattagtacaggccatccagattacttgggtcaaacgcaccaggaactttcttatctagttcttccttggcttgttcgcctacatctttaaagtgctttgccagcttgtcttcaagtttcttatcaaacttagcatcctttgcggcttctacttgctttgctacctgtaaaatggtgtctttgtaaactacgccaatgactacaccagcggcaaaagttaaaattttgttcataatttttcctcctaaaaacaaaaagcaacagcttagctgctattgcaattcacgtgatcctgaattttttggattctagtagcccacatcgctgactacaacgagtaatgttggattcgaaccaacacgggtgcacttcgtaaccgattcaattgaatgtgttgtgaaactgttaattatggttatacgcaccagattactcaacgggcaccacgggtattgaacccatgctactcacctaaattcttggagaaatctaaattaataataagcattaacttaacggtgagcagactacctatccgcccatataggcaagcctcttcaaacttaccatcgagcttatcaggactagaacaatgtttaataagctcagtccgctcggtggatttacacgtcttcgcagactacacaagctgaaggattcgaacctccgattctagttttggagactagcgtgataccaacttcaccaagcttataggagatagggctgtgctttttgcacaacccatttatttataaaaaaacaaaggtttataatgactcaaaaaataaacactaatttaaaagtattgagcatcgtcaaaagatcagatctctttcctaatctttcgactttactaatataacccgctttaatggtcaagtgttggtcaaaaatgcgccaaaaattggcgtttattggtcaaaaattggtcatccatgcaccatcaacacgggaattagtctttcagcattgtacttcttgcggtaccgctctaggtgttgagcgaatatataaagtgcttcgtcccttttacgtccgtacgttcttggagaataattcatatcgttataaatccattgtgcaaaatcgtttttaacgtatcttctaatcaaaattttgcggtacggatctcgtacagtatcaggacaactattcatagcttcaaccacggcacgggtagcattttcacaatccttgacaattgcatcgtacttgtcctgttgctcaatagcctttaaaaattggtcgggctgatgatttacgttgccgctgccatgaacgcctgtagggtcaagaagtggactagataagtaagttaccggcaaacctgaataattcatgatgtccggaaaatcattttcaaaaaaattctttgccttgctaattgttttttctttatcaaaattcagacctgctaaactcacaatcttcactcccatgaaaccagccacgctggtgaaacttctaatacttttgctaatttctcagccctacttaacgaaggctctctttgttgcttgacgtaccattcaagtgatctctcactaataccacttaacttagataaatcctttaaagtaatatttttagcagcacaagcttctttaatctttaaaaacgccattaccaggcttcccgtgagtctggaactaataccaatattgaccaacatactagaactggcaagattataaatcctattccaagaaacgcattaaaccagttacaatgcggcatccatagaataaataggttgctaataacgccaaaacagataattccaaatgattgagctagctttaaattccaagtttttcttttacttgctagaactataccaaggctaaaagctgttaagccacaagcatatatagcaactaccagcataattaatttaaaatacattgtttcccctattctcttcatacttccttgtaatctggataaccatagccgattaagccttcattgacgatctttacagcgtcctcaaccgatctagctataccgtggattacatgcttatgcattaaatcaagatggtacatttgttgcatttgactaattcgtccttttggcgccttaacttcaataaaaaatacttgcttatcttttaaacggtacccgattaagtcaggagttccaggcttaacccccctgaaaagatgaccattccttgtaggaatagcaccagcatttagcctaatgacagcgcatcgccgccaatttaaggtggcaataattgcgttttgaatcctatgttcgggacctggtccccgtctcacccttctaactcgttgcatcctttactcctgcgttttcaaaatgatttttaaagcatcctcgcttacgtgatgagttgcatggttgccataactgacaaaatgcaaatttaagtcatgtcccatcacataagttttaaagccgtctgtgattgtttctcctacttcaatgtctaacatcaattcacctcttatcaaatttttaagctagtttgtgcgttggaattttgaatttcacgttgaaggacaaaatcaggataccaattgtgagtaaattccatagctttttcaaagtattgcttttctaaactgtcataccttggaatttgaaactcttttttgaaatctctaccaaacgcattaaatacttttctagccttagtttctttgtaataattgctatttacaccgccaatggcttcaattaccttcttttttcttgcttgaagcagctggtagcgttgaacttcacttaattcacttgttttctcaatatggtcaacacgggcttcaaccttgcccattctcttaacaaggcgattagcaaccaccatagttagttgtaattgctcttccggcgtttgcggtaagttgtcttcatttctaattaattcgtccattcgattaaaggcttcaatgtattcaagcttgaacttcattgcatccctgccggtaaagcccattgcaagcaaggtgaacccgtcacggttcatgtagtacattggctgttcttgcccccgatcattaacataagtgctttcagcaaacatctttttcactgctgaattttcagcagtgagatttctaatactttgaagcacatttttatgctctttactaaaagtagcagctactttcaagctagttgttaaagccttctgacttttcatgattactaagtcattcaccttgtgacgctcctttcataaactcagccatttttttaccgtcttcaaacgcttgttcagctctcccctcagcgtaaccggcgttgtaattattagtacctacctctttaaccaatcgagctaaaatcttagcctgattgtgattagttactaacttttcttgatcgattaagtcatagccctcagaagtaataagaccgctgatattttgaacagctaagatattttttaagtaagttactggttcactagtcatttttttattgctcctttagttgcctcaaattccatgaaaagcctgaaatagcctccatagccttggccatttgctttacatttccgtaaccaccatgaaaattaacgtcgccgttaatatataattcgcaataaggaaaattactgcaacgaatgtaagtcacgtcaggagtccccatgccttccactacgttaaaattatcatcaatatcttttaggtccttttctagctggtcaactagctctttgcgtttttctttcaaagttggtttgtgaggtaccgtggtaatcacgatacgttttataggatgcggcaaacccggtgatttcgtagaataatccgtgaagttgggctcaacattcgcaccctcaacatcgccaacatccctgccaaaatactcttttaatgcttctgttagtttcttttctttatcgttcatttctaaccctcctaaaacggaatatcgccgttatttctaagtaactcggttaagccgccaatttcatctaaaatttgatccgttttttctttttcgtactgctcaatcttttttgctttaaaagattcataatcttcaaaattggctttcaaataagcatcaatgaatttatgagggtaactattatcgtcatatctttgttcaaaagcttctttaatatttctagaaggaaaactgataagctcacctttgaatcttagttcacctaaaacagatttacccaaaccttctaacgcatccgaacaaagagcataaaacgtttcaacagcctgttcatgaattctcttttctaaaaatgatttcttatctgtcatttctttaactcctttactttgtctttcactaccgtgtaggctaaccaaaccgaatatcctgccagccacaccattgcggtgacgataaacataaccagtagaaccttgattacatctatcatttcttgaaccctcgctctttcatccctttaatcctttcttagcttcttttcatcaaacatatagacagctaaatgaccggcgcttgcgccgcaaagaggacaatgcaagttgtcttctgccgttaaaacatcgtaagtgtctattgatacgttttccccgcaattatcacaatgaaacatcatttcatcttgtccatgtccggttaatcttttacagttcataaattttcacccctatctctgttagtccgtcaaataaccgttgtcggtcttctccaacaatgcagcctatgccttttctgccaataaattgagcacatgctatgtcgtcagtagtccaatagcctggctgaggttcagggtgcaccacttcgctaaatgtaaccttaatagtgaattccctttgaactaatgcatattgcttgccgtcaactagctggtccgctgacgtgatcagttttctagtcatcatcgtcattgtgtgtcaccttcttcaaaaaatcattgtctttatgctcttgccttagcttgtcgaattcatgatcaatcaattttaaaagcaattcagtatgtgcatcatgttttttatcattgttcaagcgcgaaagtatttcatgcatttcatgatcatcaagcatggtcagtgctttcataagcaagcgcgcattaactactcgcatttattcatcagtcaaaacatgaccatcatttgcggtaaggctttcggcacagtcaaccactatcgcagatttgatatagtctaatgcaattgtcatatcatccgcacgttccactgatttctgaattttctttactgtttcgtctttcatatttattaatcctttcttaactcaacttgcgcgtcattaggtaaaacaataacttttcctctttgccggatttcaatctttccaccagtcgaatcattaccaccattgttatagggatacacactaacatcactataggtcttagagctcttgtccgaatagataaccacaacctccttaaaatgccccgtatcaataccgttggtgttcgtcgtagcactattccaccatcccggcatcgtacagccggacagcattacagcgataattgacgctagaaatacgattttaatttttttcatttacttaaccctttctctttcttatctgctttaaaggatcctgtcgatcaagctcccgcagaattccagctatttcttccatcgcagaattatggcttttttgctttgcataatcgcaaacttccgaaaagttggtgtctaaatgagttcttactaaaagagctccgttaaagaagccagtaaacatccaaacaactgtatatgtggtgttcgtagcttcgcagtaaaattgatcaccggtatttacatcatcaaaaggtaaatcaaataattttggctgatccatatttagcctcctatacctcttttttcttgttcaattgcgtaatccattacttcaagggctaagcggctaaggtcgtaagtcataacaacgatttcattccaatcttcgggcgttagcacgtcacgcttttcaatttgtttcgccttatgcatcagcttgtgaattcggttatctagccccgtatcagaccacttagtattttctagtaagtcgtttaagtcattcatcgctatttccgtttcttaaaatcttctagtaacttagcttcttttttgtttcttgcgccacattgcgcaattgctgaaatgtattcatccctgaataccgttttccagccatcgtcatctaaattatccaaacgcttatcaattcgagttataaacggcatgaccgtccgaataaagccttcttccgttgagcaacctttccaagctacttcatgtgaaatgtgaaacctatcaaaagttttcaaactatcaagcgaataagcttcaattctcacgttttttgggtttgccattggtataaagaagaatttaaatcccctaatcgtgataggaacaccccaccgtaccagccaacgaccttcaacatctagctccatgctggaccgtggcccaacctcaatagctacaaacttacgcattttaactcctaacctcttcaatattttcaaacccgtaatactgacctaacgcaacctccgcttcagtgaaattatcaaactcacctaaagcacattttttgaaaggataaagccagtacaactcgtacttttctttttcgttaagaacaatcttgataagcggatcaccgtcaagactttttacccgaaacagaacactatgcattgtgatcgtttctcacttttggtgcgtgtccaaccgtccacggtgctggcatttcgtccctagggcggtcaaagaatttatacggttcaaagtgcgtcacgtggttcaaattaatgcacccccgttttttagccgaagccagttgttattttctgctaaagcttcgtaaatgctttctacagttacatccttagtcttaaaggtttgaccgtttacgtaagtaattgctacgccctttgtatagctgttcaaagaactagggcggttatgtgtaaagctactgttcttgtagtgacttgggttggtatccaattcactaaatttacttgctttaaacttacaattgccaaaattgtactttgtattcattttttgtttttaccttgtttctataaatctttaattactagttttggatagtctggttgcattaaagcaaccataaggaaggctttacccaacatttttctaaaaaattgccaagtgggtacatctgcaatgttaataacgattgatccgccgcggcagataccatctcccgcatattttgtctttttgatcttagacggtagccaaacctcaactgtgcaaacgttactaagcttccctaagtaggctttactaatctggtcaatctcataagcagttaaattagggttgctgtttgcgtacttttgacttgttagataaaatttcatgttaatctcctagtaaaccatgctcagcaaatgaaaagtaatttccattaccaacgataaaatggtctaacatgcgtactttaattagctcagacaaatttttaattgaatcagtcatctttaaatcagcttttgagggcttcattgaaccgcttggatgattatgtaccacaatgaagttagcggccccattaaggcataaggttttaacgattaggggcactgaaatagctgaattctctaccgttcctgaacccactaaatcatcagaaatgatttgtccttggttgcttaaactgatcaaatgcatttcttcgtgatcaggttccgcatatttgccggctaggtaatcgccaaaaccacgtgaatcatgaaagatcggttcccttgtagttgctaaccgcaattccagctctagcaatctgatataagcctttagccctctttcagataagttgttgctaaacaaaccgaccgacatttcttttttaacgccttcaagcgttttaagcttgtcatagtgacttaagtcatcgcttactgttttaatcaaatcttccatgttcatttcttgaatatttttttctttgtaatttcttcgagtcattgttctagtcctttactttcaaagtaccaagtcctaaataaacaattttttgatcacccgtaacttggattttcctgctattttgcgtatcaatctcataaagatgactattgggaatgtagtcaataccaagcttccatctcataaaggaatattgaaagacattagagagttgacgtggagttactacgcaaccaatttttaaatcaaaaatcatttttacagcctatcctttaactcttctttgctaatgccgcaaaaagtgctatttagcattcctacttttttgcccagttccctcagcgttaagctatgctttttccttaattcttttagcctgttcatcacttcccccaactttcagaatccttgtcaattgctaacccatcacgaagcatttttagcaggtaggcgaatggatcattaaccatgttccattgcattttcatgtcaaacttgctaacgacggcttttaaggtgtcaatgttgcaccggtaaagcaagcttcttagttgcttaatttcgtcataggttggattagtagccttttgcttcatcctgtcgtgcatccttgccagttggaaaaattgtttataaatttgttcacgttctgggtcttcttctcttcttcgtccagaagaagaattactatctgtattactattagatgtattactagatgtattactagttacgcattttttaaatacccctttagtatttttaatacccctatttaattttttaacgggggtatttaatttattaactaccctaataattcgttgagtaacattattgttagtcgtataagtagcttggatgtatcctttttcttttaagtctgtaatcaattgggacgctcgccccgaggttactccaagaaaatccgcaaaatgtttattacttgcaaagcaaccattttcaccgtctaaactatcgatttcagtaattaggacgacttccataatcgttaaattttcatcaagccaatactcagcgggaatccaaacgcctttgaacttgcgattgttttcgcttgtttttctttttttagcggtcatgctaatcacctagaatgtcatcaaataaactttgttgcccttcactcattggagcgtcttcttttttatcgggaaacgggtccgttttaggcttatctacaatgtctttgattacctcgtcctccgatttcggtttctttatctttttgactgcttctttaacttgttgatctctttcttttctacaatcaacggctttttgcttagctttatcaagatggtggttaagctcataatcaccaagcaactgcctaatataatcgccggttgccttatcatgcttacccttaatccagtttttagccttaattgagtgattattaacgtaatcctcaaaaattattttgatagcattttcatcaactacttgtgattgattcattttctgggcttgcgcatcgtcgtcatcttcgcttgcaatcccaaatgcggctgaaagtgaatacctttttccataactgatcaggcttgctgttgcttgtgcgttaccaacgttaacatttttgaaccaaaccttattagttcgtacactgtaacccgttgccgcatcaacaattacagtctcaacagttacgccctcagcaccgttgtcaatgtcaaaatagtaagtaaatatcggcttgccatcttctgcagtcttttttatcgcgtccatgattgctttatcaacatcagccaaatccgcatacttgtaagtgtagtgataaggcttgccattttgggtggctcctcgaacttcaactttgtgtgtttttttcggctgtacaatagccatcttgaccattgctagatgcatagcccatgaagctttatcttttcgattctgctgctcattcgtataagtaagaatttttagttttggctcattgtccgttttcttatactttttgatgtcaaaattcttaattaattcttgatttggctcaataaaatcactaaacccttgttcttttgtagtcattatttaattctccttgctttaattccccagtctttcaaaaagctgttcaattgatcaacttggtacttagtaacgttttgaaattcaagactgaaagtataagtcttgtccttaacttctcctgtttgagggtcaattgccttatcgccatgcttaaccaagtcggcttgttctttttgcttggtttctttttgctttttagcaattgcgattaattcatctttttccgcttgcatgtcattgagaatctcatcaagtgggacctctctttgcaattggtcgaagtagtgagcaaatggaattcctaattcgtcggctttttgaatgatgattcgtttattagtttcgagttgctgcttatttttgcgtaaaatatcaacttgctcgtataattcagcttcaaatttagggttactgtaagttttgttatcccagctagcgttatatctaatcttgctaggatctactccagcgtcctcacaagcctgtttaatgaatttgacatgttgatcatgcttatcttgtcttaacttgtcgtcgtaatgtttaagctgtgaatcgatgttttttgttgtttcgtcaataattgcgattaagtcgtcaatgttagccttgaacatttttgccggcttttgaatcccgctagtgatcgagattctttgtgaattgatagttcttttaagcttgttaagatttttccttacttcctttgaagatttaaggttttgcggtgttaccgtccaatcagcgaattcatcgtgaacctttaagatgttgcccttcatttcttcgtattttggaaaaataatttcagctggtttatagcttactgggtactcaatgccatcaaattggattagttcattgttagtcatcgtaaatatctcctagttcttcgccgtcaaagtagtcaaagatcaattcttttagtgaatcttggtttaaatcgttccaatcggctaaaaaatcacccattgaaaaacttgctttgcctagcccatagccaagtgacttcgcaagccgattcaagtcgcctttatagtcttggtttacctttttcatgaagaaatccattggcttttcataagcgttgtcaaagtcatcagcatttttagtaattaatgcctgttcttcaccgtcccagaaaagaattgcgtctggctcttctagtgatagatcttttagtgcttgattttcgtacaagtactttgtttcttttacttgttctgcatttaacgtttccattgtggtataatctccttattgaaatatttttttctttgtttaacaccctttactgtctctagcagtagagggctttttgttttgccagaccaagaaacttcttaacttctttggtcaatctagcgaaatccccactagcaacgctaatagcattactattagcaagaacactgcgttggaagtctgtaagttgattcttttgtccacttgaaaaagttcgtttataaattgattccatagcttcattagtcccccacttgcttcttaatcacttctttaaaagccttaaaatccgtcgacatcccgttttcatctgcttctttctttacccgctcgtaaaattgaatcgctagaatcatttgttgaggtagcgacgccatagttgctgtttcggtttgtacgccaacaaccgcatttattgccggctgtggtacccgaagggtatcctgagggatttgaagaattgcaaacgaattttcgttttgaataatttccttaactgctttttgcaaaatgtcataaccgtcttgtctcactttttagtctccttaattcgttgctgataaccagtcagtcttaacttttaaaactttcgcaagttcatgaagtactcgcttgttaggaaaactagagccttgctcataccgcccaatagttctaactccaagccctacggcttccgctaattgctcttgtgttaagttcttgttctttcttgttcgctttaaacgaactttgaaaattgctgaattattcatatgctcacctactttctaagcttctttacggcacgtacgcctaaagccgtaaagagaattaatagaactaacagcagggaaatgatttggtcggggtgcgatgtgccgtaaatgcaaacctgttcaacgattgcaaatggtaaaaatagaattgctaagaattctaggaacttcccaaacgctttagtcatatgacttaaaacgtgatctaacttagttctgccgtactctctttcgtattcttctttgctcattttgctttctccttttgaacttgcttgccgttttcaatacagtaatcaatcactgatcttctggcttcgtttactagttctgttgtcttttccgacttcttacggttttcaaagaacctaaccatcacttcacttagcaagtcttgcaagcctttatagccaggttcaaatgctactagtgaaccgttatctagccagaggtaaaatctataatcttcatcgctggtaatgttgaattgatccgggttttcgtcaaacacgccaaattctttgacgatttcgtaaaccttcttatttgtaattactgtcatttaaatcaccttttctaaataccttcgcttggattcttctgcaaaatgatctaagtcttcccgcaaatagtacttattgccgtcatcgccaaatggaaaagttgggtcaagttttcccgtcttaacagctttatcaagtgtgccgccgctaaagcctaaatacttagcagcatctttgcggttgaacattttttgatcaattacttcgccacgttttttcagttcctctctaactacttcttgaacaatcttttcgatgatttgtttcaacatagtttgattaagaagttccatttttagtcacctcttttattagttaccaatttcttgtagcttttgtctaaaaaaatttctggtgaaattcctaaagcactacttacggcaaaagcaaaatcaacagtaaacttgccatggccgtttaagtagtagcttaaattagatggcggaattcccatcttttcagccaggtatttatttttgatgccgtgactgtccagatacttttttagaatttctgaagaattcgattttgtaaactgtgtcatctgttcaccccctttttttatcatttaaaagttacaagtaatttgtaactccttacacgttttataatactacaaatatttaaaattacaacatttttctacaagtttttagtagaaaagtactatttttttgtatttaacttataattgcttatataagtacaagaaaataggaggtttaataatgactgattttagtagtaagctcaaatacgagcgtgagcggatgggatggagcaaaacaaaactagcgaagtacgttggtgttgggctatctacctatgctaattgggagtacggcatagcagaaccagatattgcaactattaaaaagatttgtgaagcgcttggaatttcttctgacgttttactagatttaagtgttcaaaatgccgcatcatctactagtgatttagatgaaatgttagatgatgcccgttcgtttgatggtaagctgttggatgaacatgacagagaattaattagaggaattttaaaaaggatttacagcgaaaaataaggtgtttgtcttggataccaatgttagtaagttacttaaaaaatataaattaaaactggaatttgcccctttacattgtcctggcttaatagtgcatggtaaaaacggaaaacctgatgtaatagtagttaactctaagctcaacgacgatcaagtggaaaacgtcattctacatgaaattggtcatgcaaaaaatgatggtgacgttttaggcgactaccaaacaaatgatagtgcccgctcatgtagcgagcatggagctaatgttttttggattcacgaaaaaatcaaacagtactttgcgttaggtaatgatcttgacagcgcaaattggttgagtattgcaaatgcgcttggaacaactgattactttcaggtgcaagaagaaatacataaatatgctttattggaggaataattatggcaggttacattatgtttttggtaattggattaggattaatcccttttgccttttggattgacaaagttaacgcaaattcaacaattggcaaggaacaccccgaaaaattaaaaaagcctttgcataagcgatggtggatgtacctaatcgcggttgtcttagtagttggcagtgtcgcaaatctagctgacccagctacttatagatccagccagcccaagtctcaccgcttagctagtgataaagaaatgcaaaaggaatataaaaagacggttgaagaccgtgaaaatgctgaaagccaaaatttaccaggtcaaaaattaaataagaatttggctaataaaggcgaatctttttggacagctaaaaacgataaaaaagttcatatctttgcttatgacggcaaagtaacggctatcaaatacgttttaaagccgaatatacaaagtactgtcacttgtcaaagcatcttagaaaagctattcaacgataagaatttgaaatacggcaacgacaaggaaaatagcaatgatgcgttactagataacggttcatcttataacctttactcgcctgctcgtaaaaaatggtattggataagctttagtgcggctgatggtaaagatatggtttctactttttccgtctattctggcaaaaatagtgacgcaaaataaaaaacacccgcctactctatcgagcgggcgggttaatttatacggattgaaagaacattagtttagaaaggactagaacatgccaagaaaaaaagatcctgaaatttacgattacaagttgaagtccggtaagacaaaatatggctttaaaacctacgtgggcattaacccagaagatggtaaacctatcaagcctactaggcaggggtttaacagttacaaggaagcagaagccgctaagataaaattaaaagccgctggtgctatcagcgttgcaaataatcgtaaagccgaatccaataagaaaacagttcaagaagtctacgacatctggttttcgattaaaaaggataatgttagggaatcaacattatacaatattaaatgtgattgggaaaatcacattaaacctgagtttggtaacaaatatatagatcgtattgatatcacgcgcttacaaaagtttgttaattggttatctcaaaaatacattagttatcagtataaagtcaatatactacacagaattattaagtatgcaattttgcgcggttggtgtaacgaagacccttttaataaaattgttattcctaaaaaatcatctaaaaaaagtgatcgtcctaaggaaaattattacaatttagatgaattgaaggaattcttaagtgccgctaaagaacataattactcctactatgcgttttttgtagttctagggaatttagggctaagacgtggtgaagcattagctttgaagtggaaaaatattgatttcgataaacaaatagtacatatagatcacactgtatcccacgatttgcaaaataaaaaagtaattggtgatcctaaaacgtattcggcaaaaagagatttagccttatcaaagaacttaaattatgttttaagggaatatagaaaaactcagaaagtttttaatcgtgatgatgattatatttttcacacgaaaaacggaagctttttcaattcgccggcagtttcagaatggatgaaaagcatttaccacttttacccggaactaagaaaaataaccgctcacggctttcgccatagcttagctacgctactttacgaaggaagtgacaagataacccctaaagatgtacaatacgttttaggacactctagagtaacaacagcacttaacatttatacccatgtcactcagaaccaaaaaagcaatatcaaaaatgcagttaacaacttggatttagaataaaaaaataatttttccgtactttttccgtaaaattttattttttaatgattcaaaatcaaatttattgcttatactcccttatataaagctaaaagtgactaattaaattcttatttttgcaaaattcatgcaatatatgaacaaaatttgacgacaaaataagcatccctacgccataaaagatcgttttagggatgcttatttaattaataatctaattcttgatccatacttgcaggccagccaccaataccacgtttttgatcaaggccacgcaatgtctccatctcttcagcagtaaattcaaaatcaaaaatatccaaattatccttcatgtgtaacggattcgtcgagccaggaatagtcatgatattttcttgtaccaagaagtgtaacgcaatttgtggcactgtcttattatacttctcagccaaagaaagtaaggttgggtcattaaataaagccttcattccttcaccgagtggtgaccaagattcatgtacaatattattttcaattaaatatttatgcattttcttttgttgcttaaagacagacgtttcaatttgatcaactactggcttagtatcgaaattattcataatttcatttacttgatcatggttgaagttactcagtccaattgaacgtagctttcccacctgatatgcctcctcaagtgcctggtaagtacctaaactatcagacataggccagtgaataatcattaaatcaaaatagtcttgctgggcgtgaattaacgattcatcaatcccattcttcgtctctctataaccacttgtttgcgctttagtggtcaaaaaaatgtcttcacgtttaatgccgcttttgttaatagcattgcctacttctgcttcattactgtatgcttgagcagtatcaattaaccgatatccagccttcaaagcctcgacaaccgctccttcagtaattctaggctgaattctatatgttccaaagccgaagattggagtttttacaccgttattaaaagttaaatatttcatttttattcctcaatattttattcaggatcagatgcagagtgataagtaatactaaatccagcttgatattccttacctggctccaaatgattcataccatatttgtgctctagctcaccatcagcatcttctctatctgcaattccccaccatggctcaatgcatacataattagcggtatttggatattgtgaccaaatgccaacatatggtgcatttctagtccaaacattgatgtggaacttactcttatcagttctcaaagatactttattgtcatgaccatgtaattcataaatcaaggcatcatctttaaatagctcatcacttaaaccaataaaactatcagtcgaagctagagaacgattattccagtcaagatatgctcctttaagtgggatttttaccctagcaatagatggatgcatatcgaaataataatcttctttctcttccccattatttactggtaagttaaatccagggtgaccacctacaccaaaaatcatagtttcatctgatttattaactacgctaaagttttcttccaataaattattcatcaaattatagttaactctgaattcaaatttaaatggatacatttcacgcgttttttcattatctttcagtaagaacgtgatactttcttgtgtatgattctccacttcaaaatcacaatcacgggcaaaaccatgctgacccatatgataggtcttaccttgatacttatattcatcattcttaagtcgccctacaattggaaaaagtacaggtgcatgtctgccccagatctctggatcagcttgccacatatattcttcaccggtatgagctcctttaacgctctgaacttcagctccgtgatccgaaatcactacttcgatcatattattcttgattgtgtaatccataactaaatttccctctacatatcaaacagttaaaaatcataatgtaatcgcttaattacttatattttaacattaatgcgtcaataagccagaataaaaacaaaagaaaaaagcattcaaactttgaattgaatgcttcattcgtgattctttgatcaattagagaataaatttagttaagtctttattcataataatatcgcctaacttatcttcaacataggcttcagtaactgtgatttcacccatttccatatcaggcccttcgtaaagaacgtcttctaagagcttttcaagaatagttgaaagtcgacgagcaccaatattatcagtgccttggttaacatcaaaggcaatctccgcaattttatcaacggcttcttgggtgaaaactaacttaatgccatctgccttcattaaagcaatgtattgcttaagcaatgaattttgtggatccttcaagatcttgacaaaatcgtccttggttaaagcgttaagttcaacccgaattggaaaacgtccttgaagttctggaatcaaatcactaggcttactttcagcaaaggcacctgcagcaataaacaaaatatgatcagttgaaactgggccatattttgtatttacagttgagccttcaacgattggtaaaatatctctttgaacaccttcacgagaaacttcaccagaattacgtttattaccagcaataattttatcaatttcatcaataaagataattccgttattctggcttctttcaatagcatgttgatagatagcgtcatagtcaactaacttacgtgattcttcttgaatcaaaacttcacgtgcttcttttactgataaagtacgcttaacctttttcttaggcataagatcactaagcattgagcccatatccatccccatttgacccatcatgtcactcattgggttggccttaggagcttgttctacctctatggtaacttcgtgatcttcaagtaagcctttagctagcttttcagccacatccattcgtttgtttcttacatcagcagaaacatcctcttcatgatcttcttcgcgattattttctcccatcaacatagacatcatatcttgcatttgctgcatttgattttcacgacgttcatgtttctctgctggagctaacaaacgaactaattctttatttgcttctttagttgcttgagtctttacacgagcaaattggtccttttcttccattcgtacggcttcggaaaccaagtcacggaccattgattcaacgtcacgtcctacataacctacttcagtaaacttcgttgcctctactttaacaaagggagcttctacaatatcagctaaacgacgagcaatttcagttttacctacaccagtaggaccagccattaataaattcttaggcgttacttcacgttgcatttctttagataactgcattctacggtaacggttgtaaagagctatcgcaactgattttttagcttcatcttggccaataatatattcgtttaaaattttaactatttcttttggggtcttaatagccatttccttcactcctaaatttcatcagtgacaattttatcatcagtgaaaacatcaattcctgaagcaatctttacagcttcatgtgcaatttcatcggccttcatatcttttgcgtgtcgagtcatggcaatcgctgcggcttgagcaaaattaccacctgaaccaattgcaactacgttttcatcaggttcaagtacttcaccattacctgaaattaaaagtaggtctttgtcatcaaaagcaatcaacattgcatttaatttttgtagagttggatccttacgccatgcttgagccatttccacggcagcacgacgaagatcgcctgagtagctttcgagcttgccctcaagcatatcttgaaggctgactgcatcagctacaccaccggcaaaaccaattactacacgatcatggtaaatacgacgaatcttacgcgctgttgccttggcaataactttttcgcctaaggttacttgtccatcaccggcaattgctgtttttccattaaatcttactgaacaaattgttgtcatgttaaacctcaactttctttattacgaggaaaatatttttgataatctgattttaaatgagccattgttacatgagtatagatttgcgttgctgatagactactgtgtcctaataactcttggacacttcgcaaatctgctccattattaagcatcgcggtagcaaagctatgtcgcaactcatgtgggtgtactttaccactaattcctgcctgattaaaagttttttgcattacagtttcaattccgcggctagtaatgccagttccttgattatttaaaaatacatgctgttcatcatcatttttaagtaataatggacgtgcattttctaaataagcaatcaaagatttttttgttttatcatcaaaagcaacatagcggtctttatttcctttaccgtgaaccaaaattgtctgtaagtctaaatcaagttgattcaaagtaagattactaacctcacttacccgcatccctgtcgcataaaacagttcaaacattgccaaatttctcatcgtcaaaggcttatttcctttcaatgaatcaaaaacctgctttaattcaggctggtaaaaaaattgcggtaattttttctcaccacggcgtaaagtaatacccttagttggatcgattgccactagtttgcggcgggttaaaaagcggtaaaaagaatgcaggctggacatcttgcgcaactgactactacgggctaacttgcgttctgctaaatgttgtagataaacctggatatcacgttctcttactttagtccaacctgggaatccaccattttcatgccaaaacctttccgcttcatgcaaatctgtttgataagctaaaacggttttcgcactataatgacgctcattttgtaaatatgataaaaattgatctaactcactttgcctttggttcattaatctaaaacttccgtcttaaattcatctaaactagcaagaccacgttcactgaccttctcatggcgctcacgcttcttgcgaatcttcttaccctctagtggaggtagcaaagcaaaactagcattcattggttggaaatgtttagcactcgtagtagttatgtagttagccattgagcctaacgcagtatcttttgggaaagccacagtatctttccccatagcttcacgtgctgcattaattcctgctactaagccactacctgcactttctacatagccttcaacacctgtcatctggcctgcaaaaaataatccaggctgctcttttgcctcgtaagaagctgtcaaaacttctggtgaagccatataagtattacgatgcattttaccataacgaacgaaacgtgcattttctaagcctgggatcattgaaaatactcgtttttgttcaccaaatttcaaatgagtttggaaaccaacaatattatacattgaagctgcagcattatcttggcgcaactgtacaactgcataaggagttttgcctgtatgtggatcttctaatcctactggtttaagtggaccaaaaagcattgttttagccccacgcgctgccattacttcaattggcatacacccctcaaaaacatcgctattttcaaaaccatgtaattgcgcagtttcagcgttaattaattcctgactaaacttttcatattgctctttagtcataggacaattcaaatatgcagcttcaccacgatcataacgcgactttttataaacaattttcatatcaatcgagtcagcggccacaatcggagctgctgcatcaaagaaatgtaaactatcagttccagaaaatttttgaatctgtccagctaaagcatcactagttaacggaccagttgcaataattgtaatcccatctttcggaatttcagtaacttcttcttcgtgaacagttacattctctaacccacgcaaagtgtcagttacgtatttactgaaactatcacgatcaacggctaatgctccacctgcaggcacttgagttttgtcggcagctttcatgatcaatgaatctaaatgacgcatttcttcttttaaaagacctacagcattagataattgatttgatctcattgaattggtacaaaccagttccgcaaattcaccagtttcatgagctggagtctccttttttggtcgcatttcataaaggtcaacatgaataccacgcttagctaattgccaagttgcttcactaccagcaagacctgcaccaataactgttacattttttggcatttactcacctatattttctatgttaattgtttttttcgttttcactgtcttcacgataatcaccgttaggacaaagaatcactggaccttttttagaatgcttttctactaaaaagtggccatcatttggacaatttctgccaattggcttgtcccatgagacaaagtcgcattctggataacgagaacagccgtagaatttacgatttctacgtgatttcttttcgacaacctgacctttgccacattttggacaaactacaccgatttctttaatgattggcttagtattacgacaatctgggaaacgagaacaagcatagaacttgccatagcgtcccatcttaatcaccattggtgcaccacaaatatcacaattaaagccagctggttcatccttgatttgtaccttttcgatttcactatcagccttatttaattctttcttaaacggttgatagtattcgtcaacaacatgaacccaatcctttttaccatcttcgacttcatccaattcattttcaagtcgggcggtgtaatcaacatcagtaatatctgggaagaagctttcaattaagccatcaacaatttcacctaattcagttggtacaattgaacgaccatcaagtttaacataatagcggcgttgaattgtatctattgtaggtgcataagttgaaggacggcccacgccattttcttccaatgcgtgaactaatgatgcttcagtatagcgtgctggtggtaacgtaaagtgctgtttgttatcggacttagtcatcttgaccttgtcaccctcttcaagatcaggtaagtcaacattcttttcttgttgattatcataaaccttggtgaaaccagcaaatttcaatttagaaccagtagttctaaaaatcacaccattttgaacaatatctgcacgaacagtatcataaacagctggggtcatttcactggccaaaaaacgtgaccaaatcaatttgtataaacgatattgttccgtagttaggacactctttaatgactccggtgtgcgatatacagatgttgggcgaatggcctcgtgagcatcttgtgcgtcttcttgattcttaaaatggcgttgactcttagctgcaaattctgcaccataattttcatgcaaaaacttagaagcctcttgttgggcaactggtgatgttctcttagagtcagttctcatataagtaatcaaaccaactgttccttgcttacctaaagaaatcccttcatataattgctgagcaatactcatagttctacgagtacgataacctaaacgcttattggcttcttgctgcattgtagaagttgtaaatggggctgctggctgacgccgacgttgccgagcaacaactttatctactacaaagtcctttttcttatcgattttagccaaaacatccttaacagaatcgatattaggcaattctttctttttgccatcaacaccataaaaggcagatttaaaagtttctttacccttagcaaattccgcatcaattgaccaatattcttttggcttaaagttcttgatctccttttcacgatcaatcactaattttaaggcaactgattgtacacgtcctgcagataaaccttttttaactttggcccaaagaattggtgaaagtgaataccctacaattcgatcaagtacacgtcttgcctgttgggcatcaaccgtatccatatcaattgtccggggatgcttgaagctttctttaactgcatccttggtaacttcgttaaaagttactctattcttggctttttcgtcaagattcaatgcgtgcgctacgtgccaagcaattgcttcgccttcacgatcggggtcggatgctaaataaacatccttagccttcttggcttcgctttttaattctttaatggtatcgcctttaccacgaatggaaatatacttaggcttatagtcgtcttcaaagtcgattcccatttgtgacttaggcaaatcacgaatatgccccttggaagcaataacgtgatagtttcttcctaaatatttttcaatagtcttagcttttgcaggtgattccacaatgactaaggtctttttacgtttttttgttgttttacttttcgctttagtaggcattaactgcctccttaattcttattttattttatgggtacagtccaaaaataactaatactttctgaattgtcaaatctttatcttgttaaatttaaaatcaacaattggcgtagctcctgcttcaattaattgattgggacctgcagacaatgcattagtaattggtccaggtactgcataaatatcgcgattttcttgtaacgctaaattagcagtaatcagtgaacccgacttttctttagcctcagtaacgattatgctttgacttaagccggccaagatacggttgcgttcaggaaaacgatacggacgcggtggtgtatcaggcaaatattcactaatcaatagtcccttttgcacaatctcttcttgtaaagcaaaattttgcattggatatgaaaaatttaaaccattgccaataaccgcaattgtttttccttggttgaaaagtgcagccttatgagctaaggcatcaacgccttttgctaagccacttgctacaacctgaccagattgcacaatattaggtaccaagcgattaataacatcttgactatacttagtcggatagcgtgagccaacaattgtaatgatttctttttgcagtaaagaaatatctcctcgggtaaacaataccataggtggtcgataaatttgacgtagtttttctggatatgcttcatcgaaaaaactgattacgtcacactgctgttcaatttgttgtaccattcgatccaactgatcatcctgaaaagcgcgatagcatgcatccattagttcctcagttaattcaatttgttctaattcttcaaattcaatttctgtttcatcagttacctgattagcaattgtcagcaatttaacataaccaatccctttttgcaattttaattttagtagaaattctgtttttttcataaaaaaagccctccactatttattacgcaaaaagagaccattatttttttataaattgaaatttattcaaaaaaatcactgactggagcaaatgttttgcggtgaattggcgtagggccatactttttcaaggcttcaatgtgctccttggtgccgtatcctgcattatgatgaaagcaatattgagggtatattctatcataatcatccatcaattgatctcgaaagaccttggccacaattgaagctgccgcaattgaattcgacttagcatctcccttaatcaatttaacttggggtagatttactggcacattcattgcatctaccaaaagtgcattcggcttaacatcaagtgctcgtactgcttgagccatcgcttgacggtcagcttcataaatattaatttgatcgattacctctgcactttttactccaataccaacactaactgcttccgctaaaattttaggatataacttcaatcgtttctctgggctcaatttcttcgagtcgtttacatctaataaatcaaaatcttgatcaattatcacagcagcagttactaccggtccagctaaagggccacgtcctacctcatcaacacccgctactaattgtcccttttcccagaactttttttcataagaaaagcgacgcaaaaactcttctttttttgctagtaattttgcttgacgcttacgataactaactaacaatttttgtacgccggcccgcggatctgcctcaagttcgttaatttgggcttcagagacctcagatttcaacagctcttttatttctttaattgtcatggtctatctaacgtaatccttccgattgcacccttacgcaatttttgtaacataaataatgaaaaacgatcataatcatcacgcatgccatatttttcagtcattgacaaaagcaaatctggatcagccatatcagcaatttgctgttcaggtaatttagaaaatttaagcaaatccttagcataaaattcacgtaaatttttcaaaacaaataatgctacatcatctgcatgaaaaacactatccttaattgcaccgaaagcagctaatttataaccaacttcctgatcagaaaatttaggccataaaatccctggtgtatcgagcacttgaatattagcatttgttttcagccatctttgtcccttagttacacctggtttgttaccgacttcagccacgttccgaccaactaaacgattaatcaccgttgacttgccacagttaggaatacctgccaaagcaattctaatagtaggatttgaggcccctcgtgcttctagcttctctgttttggcagctgccgccttttttactaaggaaaccaacttctgcatattagtattgtgcaaggagtcaagtgccaaaacatacttattatctccagctaattctgctgcccatgcctttgttaaaactggatcagctaaatcagccttatttaagataataatatgtggtttattaccaactagtccttcaatcattggatttcttgaagcttgcggaattcgggcatcaagtacttccaccaaaacatcaatcagtcctaacttatcttccagttgattacgagccttgttcatatgccccggataccattgaattgttgccatattatctcttctttctaaaattaatcattttcatcatctaagaacaccacttctgacatcaaaatctgtctatataaagccagaaagcctcgacgatattttctctcttgttgtgcaattttacctaaatagtcacgttcttgtctaaaagcatatctatatacctcagctctaaattctttctgatcatcgggtaattctttttgtttaattgtatactttatttccctagcaaaatcaaccatagaagtttgattcatttgtgcccttaaatcgaattttaattgttttcgaatctttttaggtaaatagatctttttcatttgatccatagcatactcaatcattgccacacgaactcgatcaacttcctttctttgatcaaaatcaggtatatctttgtccaagatcatgtgaaaaacaattgttggaacaatcatacttagtaaaataagcgtaatttcactcaccaaaattaaatggaaatctgctacattaatacgtaaatcatataacgtatatgctaaagcaaaagtaactgctccatgaatgccacccagactaaaaatcaatgcttctttattactcgtttttcctttaatagaagggctaaatcgataataaaagtatctaataagcaaattagctaggtataaaattattccgatcaaaatcgcatcaattgtttgttgattaaaatgtcttccctcattgaccgaacaatgatgattcccaaaagcaaaaagacaatcccatttaaaatatcaatcagaagttgcgataattgattactgttataaaaaataaaggcattagtaagcctgcttcgctcagattcaacgttatgaatcaatccggctgcaacgactgcaataattccagaaacgtgaatttcttctgctaaaaaatatattattaacggtgtcaaaaagaatatgacatcaaccggcattgcaacaccagcagataaatgatatttggagcgaaaactttcctgacgcaagaaaactaataaagtagccaccaaagctcctagaaaaaacctccacctgcagaatataaaaaattacctattgcttgtccaatccgtaattcttgatgcaagtaccaatcaactgccatattaagcaaaatgatacctgaagcgtcattaaacaaagactcatcttttaggtaaaaagcaatcttcttaggcagcttcaatccatgtgttacagattctgttgctgtagcatctgttggcgttgaaattgcagccagaataaaagccagtggtagagagacccatactaaaatagatcccgaatcccgcagttatagttgccaagataatcataataaccgttaacccaactattgcgccccacgaacgtaaaacattatacaacctagtacgttgtccctcaaaaaatagtaatggcgctacaatcaagcccataaataattccgagctaaagtcctcaattaatgaattagtttgtggtactagtgcaatagccgctccaatcgccattgcaatgtaattaactgatattctcttcaaaaagcgttgttgaataatcgtcgcaaatgctaccgcaaagacaataaaaccaataaaaattactacctgcatttttctacccacttaataaaaaagcccaggcatctatcaggcttgggcttaatacatcattttgtcttcatacattcgataagcacgatcaaaaattgacatacttggtaaataactagcattcaattccaaataatctgacaatttctcataatcttgttcttgcttaggaaaagtcaggtcatgctgtgcattattcgcaaattgagctacgtcatcagctgaatctgcatccctttgcgtcattaaatatcgataaaaactttctcggtaagccataattactccacataatataagatcgcataagcaccattgccagcatgtgttgcgataattggacttgtctctgccactaaaacattaatcgcaggattgattgcacgaattttttcagctaattcttccattaattcaggtgtatcaacgtacgaaatgcctacttctttaatatgctctttattatctgcgatttcttttaacactcgttcatcaaaagcacgtgtaaatttcttacctcgtccttttttggctacgattaacttaccttgtggcatctgaagagcgattctaatattaagcatagtagcaattcgaccagaaagtgcacctaaacggccacccttgattaagttttgtaaattaactaccatcatttccagtttttgagtactacgaatctttttaacatgatcaataatctcagccatgcttttaccagcctgagcatccttagcagcagccaaaacttggaagccttctgccctgtcggttagttcagagtcaataattgtaacattatcgctttgacctgcaatttctgcagcttgacgagcggcatctatcgtaccacttaatgatttagctaagaaaataccaatcacttgactgccatctgcggttaattttttaatcacatcaacaaaacggccaattggtggctgactagtcttaggtaagctctccgcttcattcatcttcttgacaaaatcacttctagtgatatcaatcccatccacatatgacttaccgtcgatggtaatcgtcaatgggactactgtaatgtcatatttttcaacttcttctggtgttaattggacggaagagtccgtcataacttttatcttcgacaacgtattcgccttcaattctaatttgtttacccgatttatgataaaatgtaagcaacatatatactgtattgtatcaaaaaactattagaagaaaaaaggattgattacacttcatgaaaattagcaaactttggcagcaaccagaacaacgatcagaaaggtactaccttctagataatatttttagtgccataactcatgggattggtttcggactagcagttaccggcttagtaattttaattgtaaaggcagctcatacaggcagcccgatgcgagttgttactttcacaatttatggctcttgcctggtactgctttatttattttccacactatatcacagtttagtttttacacgggccaaaaatatttttcaaatttttgaccattcctcaatctttcttttgattgcaggatcttatactccatattcacttgttgcaattggtggagcctggggttggactttatttggcttgatctggggcctaaccatctttggcatcatttactacatcttcaatcgtggtaaacacgtcatacttgatacaatcctctatgttgcaatgggatggttagttatcttgtcaggatcttatttatatgttcgcttaagtccaactggattctggctattagttagtggtggcattgcttacacaatcggcgcgattctgttcagtatgcgcaatgttccctttatccatactatctggcatttatttgttatgctcggttcaatcttaatgtacttttccgttttactttatgtttaaaaaatgtagcagttgaattctgctacatttttctttctattcaattgtagtcaaatagctttcaatcgcttcttgattattctcaacttcacctgaaacaactaactctcgaattttattcaaagtctgccccaattttgcacctggtcgcatcccgcgatctattaaaaatctcccatcaacggctagttccgacgcttttttaataggtaaagccatataacgatcaactaaagcttctgaagaaattggttgaccaacaatatgagcaacgtcaatcgtattaattaatgtctcttcccctgctaagaataattcataatcactaggagcatgactagaaagtaaatcaaatagattaataattctttcgacttgctcagtcatagcattagagtttttccagtcacgcataaaacgatgaatttgttcattcggtaatttcaatagcaaaattatcagtgaccacaaactattttccatcgttggactgaattttaactgtgggaaaatagctagttgatctttttttccgccaaaatcaggtacatcttcactcaaatttgtatcaagaaaaacctgaaaagcttgccgagcatgtggtcctaaacctaattttacaaattcttctcgaattcgttcaactgaaatttttttaagtaatttatgattatccttaattgcctgttgagtcttgctttctaacttaaattcaagttgactcataaaacgtacggcccgcatcattcgcaaagcatcctcgtgaaatcttttttctggatcacctacagcacgaatgacatggtttttgagatcatctagtccgttaaataagtcaacaatttgccctcgtgtatccattgccagagcgttaatcgtaaagtctctacgctttaaatcttcatctaagttttgaacaaatgttacatgatctggacgacgaaaatcttgataacccgattctgttctaaaagtggtaatctcataactttcaccaccataaaggacagtcaccgttccatgtttaattcctgtatcaattgacttatcaaataactcttttacctcttctggataagcactagtagtaatgtctacatcatgaacatgacgatgtaacaaaacatcgcggacagaaccacccacaaagtacgcttcaaagcctgcattttctaatatctgtaacacgggcattgccttggtaaaaatttctggtaaattatctatctttatcatattaaaatctcaattcttattgtctttattattacttttgctatacactttgttaaaattgaggaaagacataaaggaggtaatcattatgcgtaagattgacaaaagtatcttaattgatatcctcatgatcgcgctaggctgtgctatttacgctttaagtctagacatgatttctgtccccaataaactagccgacggcggactaactggtatttcacttcttctgcggcatttttggggcatcaacatgggactatcgacccttgtattgaatattccactaattttgttaggctatcgctttatgggcaaacgtcttttagcctatacaatctggggaacgctcagtctttcctttttcttatggttttggcattcagtacctattataaaacaattagatttagaacacgacctcttcctttcagcaatttctgctgggttattgtctggaatcggattagggttagtatttagatataatggtacttccggtggaactgatattattgcccgaatctgtcagataaaatttggtatttcgtctggcaaaatgcttttagcttgtgatgcaatagtactcttcgcatccctatcttacctagacatcaagcatatgctatacacattattagcttcttttgtcttatcccgagtaatggataccgttcagcaaggtgcatacacagcccgtggtttattaattatctctgacaaatatgaacaaattggcaagatgattgatttaaaactaaatcgtggtttcacatatctaaaagctttaggtggctatcaacaaaatgaaaaacgtgtaatttatgttgtagtcgcaccgcgggaaattccatcaatcaaagctttaatcaagcaagaagatccacatgcttttgtttcaataattgagataaatgaggcaatgggagaaggatttacttataaaaaaccacatcgctttttcatccacaagtaaaaagctataccatgatgcatttcatgatatagcttttcttttactaataattaataattacagtcaatacgttattagctttaacgtattcgttttctccaatttgaatgaatggccgttcatcaatttctttatggccaagatttttaactttagagccttgtttaacaaacttacctggaattggctgaccatttttatcataaacatatgatggatgcttaatgcggttaattgtctcggctgtgtccttaatgtatggtaaaaatgccccttccttaacgaatttattcttaccaatcttcacaaaattattgccattaattgatttaatgcctaggatcttgtaaacacggcccttttttaaatgtccaactttttctcctttacggttaaaaatcgttgcttttctagtcaagtttaactttttaccctgacgaattggattagttgtagctgcgttaactgtctgagcagtcatcgcacctaaacttaaggaggctaagactactcctgccatatacataatttttttgttcatcatgatctcatcccctaatcattacttaatcttcttacctatattttaacaaaaaatgcagaggttatacacttttctctatttttatttatgggatggataacacttattctttgcaatctttcatggcaagaactaatcttagcttgtaagcgtttgtcaatatcaagcaatcaagaggatgaaaacaatgccaaaaaacagttactcccaagaagctttcgttcatgtctatttacttcttgggaattaatggggtaattgggtccggtgcctttttaatacctcaaacaatctataaagatatgaacttgatgagtgttttcataacaatttgtgctgctcttacagtaagtatggttactctttgttatgctgacttgtcaagtcgttttactggatcaggcgcagcttggctttattcatatcacgcctttgggcgatttactggctacgaacttggaatatatacttggtttttaggatgctgtacatatgcggcagaaatagtagctttgttaactattttaaagactttgtcccctgtttttagtaatcacgctgttcactacgggatagctattggaataattgtgctaattgtgctgtttacgattattaacttatttggtcggacaattgtaaaattagtcgataacttatcctctgctgccaaaatgattactattctgatttttatcatcattggtgccttttttattcataaaatgaactttacacctgtgattcctaaagcagcaaccctaggtgttggtccttacttcaaacattttggtgctgcatttagtgtagtattttacatgtttactggattctcctttattccgattgccccaaaacagatgaataatccagagaaaaatattcccaaagtattgatctcagtgatgatcactgtgactattttatatgcattaatgatgttagtagctatcgggattttaggatccaagatggttaattacagtacgcctattgctgtagcctttcaaaaggccgttggtgattggggctacgttctagtgattgcagggatgctgattagtgttatcggcgttgcttttgcaggatctttcaatactccatcgttgattgcttctcttgactccatcgttgattgcttctcttgctaatgagcacgcaatgttacctaaatggattggaaaaaagaacaagcatgatgctgcttgggtagctattttactcagtgcaatcatcactatgattttaatcacacaatcatacctcttcttggtatcttgcattgtattggcttcatttattcaatatgtaccatctatcttagcagtaatcaaattcaagcatactaatgaatttccaaataacggttttaagctcccattcggctatgttattccagctttggcattaattatttcatgctacatggtaaccaatttcacttggaaaactattttggtcggaatagtcgtaggggtattagccgcagtagcttacttcttcattgaaaaagatgaagaaaagcatcaaaagtatttgtcaaaaatgcgtaataaataattttcaagttataaggacgatgactagaaactgtcaaatcttttgtgtaaatagttctttctcgtaaattgattttttaattatttatttaatcaaagtaggattctaaggtgtcctgaacctgaccaaagcctttatgaattcgattgaaataacggtcattgtagctcattgcctgaataccaataaaagcatcaagcgactgttcagttggaaactctgccttaggcttagctttgcgcttgatcacattgttaaatgattcaatcatgttagtcgaataaattgaagctctgatctgcttgggatagttataaaagaccagcagatctggttctatgtctttcaagcttctgataacatggctgtaaaccttgccccatttggtatagaagtcatgcaggacagctgtggcttcttctttgtttgtctgttgatgcacctgtttgaattcgttcatgatcttttcacgatcgtcgacgcgtactttagcgcagatattgcgcatgacatgaaccaaacagcgttgaaaatgagctttaggataagtcctggccaaggctgttttcatgccaacaacaccatcagaaagaaaaagctcaacttgctttaagcctcgggatttcatgttttgaagcatctctgtccagacttcaatgttctcgctaggtgcaatgcagtagtcaatgacctccttgtgcccattaggcttgatgccaatggcaatatagactgcttcacgctcaaatgtttctcggcgcaaaggaaggtatgtcgcatccaaatagacgcagaaaaacttgtcgcttagcttgcgtttgtggtaagcctcaacctttggaatcatctgcttggaaatatttgatacctgagctggactgtaatggctgccatacatcttttcaattagatcggctatttccctggtggtcacgcccttggagtaaagcttgataatcatgctttccaagatatccgagtgctgcttgtagccaggcagcgtgtgctgatgaaattgaccgttgcgatcccgaggcacttgcacttcaattgggccaaattgcgtatcaactttgcggaaataagcaccatttctagagttgccagtattccagccatttctggcatagggatcatagcccagaaaggcagtcaattcagcttctaacaagttattaacagcctgttgtagctctttgcgcaataaatcatttattttgtctggattgaatagagcttgagcaaaatctttggtaaaatcattcatgaaggagttcttctttctgtatgtgtttttttgttcaaaccaatcatacgagaaaggaactcctttttctaatgtttaaagaaataaatttaaggaatcattcatccttacacaaactattttacagtctcgatgactatccaatatcgcccttattttttgatcaattaagactttttagtctgcttttaaatctatttttcaacttatacattatgaaagcccatctcctcttaataatatttagtgctaaactgttagatagattagtattagaaaagagcaacaacaaatgagtaatcagaaagctaaaataaataataccgaaattaaaactagagtatctcacttcagaccaagccagtaaaaaaattcaagttaacataaaaggaaaaccatatgtctgaagagataattaacacagtcacaacaaaaaatgattttaagagtgcattaagaaatgcgggtattaaagatgatgataccgtattagttcatactgcactaagtaaattctattacgttcctaatggtccagaaaccattgtcgaagccttaaaagaagctgtgcctaatggaacaataatgatgccctcacaagtttctacgaattgtgatccagccacttgggaatatccaccagtacaaaaatctttgattcaagtagttaaggatgctatgccaccttataatcctacaacatcaatgacagaaggcttaggggttacgccagagtatttcagaactttgccagatgttgttcgaagtacccatccttacttgccaattgctatttggggcaaaaacaaagtaaagattgcacagaatcaacctttaaatattccttatggaattgacagtcctttagattatttgtaccagaataatggcaaaactatctttttaggcactgattatgaaacgtgtacagttttgcactatgcagaatccacaattggtagaaaaaccgaaacatgttctgctgcaactagtctggatgaaagcggcaaaactatttggactgaatatcaaaatattgatatggattcatatgatgactttaatgaattagggacagagtttgaagcaaagcatccctctgctatcaaaaaggttaagttaaacaatggtgtcatcaaagcaataaatgtaaaaccgctaattgattttgctagaaaatggtttataaaaaaagacaataatcattcaatttaataataaaaggaagaagtcactttcaacttcttcctttttctttatttaatctttgttaaaacctttgcacctatatttaaacctacactatgcgatttaccgccccaatcacgttcatcataattatccatatcagctaaagtatctgcagtgaaaagaaattgtgcaaaatcaatctttctaaactgagcacatgctgctaaagctgcacattccatttctacagttgacgcgcctaactgacgaaattgtgccacttttttaggcgtttctctaaagaaaccatctgttgtccaagtcgttatctcgtcatattctatatttagctcaactaaaatcttttctacttccttcaaaaatatagaatctagttccacaagttgtccaggattcatatagtgaaaagatgtcccttcatctcgaattgcacgtgttggaagtagcatcgcattttcaggtaaatctactaaggcacctgctgttccaatggttaacaccttttctactccataagcaattagccattcaagcaactgtacagctgccggtgctcccaagggcgcttgacacaaagtgaaaaattcgttattaatttgaacttcataaattttaggattaaaagaacatgactcaaattcacctaaagtacggtgaaaatggtgatctaaaaatgcattaatttctttttccggcacgaatgcgtaaagcaatcttggatgaaaatgaaatggttcttgatcgtgatttggttcaagaaccgcatgaggatgtttgtcaaagtctaaaatgaatggttgtttgttcatattttacactccatttttagttgaaatattatcataaactcgctaatacctgagatccaatattcaagctaacgctatatgaatcatggccccagttacgtttatcatagttatccatatcagctaaactatcggcagtaaacaaaatttgtgcaaaacttatatttctaaattctgcacaagcagctaaagctgagcactccatttctacagtttttgcacctagttttttagcttgcaaaacttgattaggtgtttctctaaaaaatccatctgttgtccaagttgttccctcttcatattggaaacctaaattttttatttcattctcaactcttcttacaaaatttttatctaatgcaataatcttacttggttctttgtagtaaaaagatgtcccctctccgcgaatcgcttcttgagggacaaacatcgtgttttcaggtagattatccaaagctcctgcgtttccaacagataaaacttgtttaactccataattgatcaaccagtctaaaaactttgttgaagctggtgctcccactggagcttgacataacgtaattagttgattattgacttccacttcatatattttaggtctaaacgaaacagttttaaatttgcccagagtcttatgagagtgtttatctaaaaacgagttaatttcatcatctgggacaaatgcaaaaagcaatttttcatgaaacttatactctaaattttcgactccaggttctattacagcttttttacttaaatcaatatctaaaacaaatgatccttcattcatatacgcgtggtgctagttaaatcgttctagacaataagccaaattataagctaaaattgcaatttccaaccggctttgaaagcctatcagactacgtgctcgattgttctcggcattgtaataggtcagaagcgaaaagtcgctttcaattgttctgcgaatagccatcaattgatgatcattgtgctttttagctcctgtcatatttttacgatatggtgtccaaagttcgtaacccatttgttttagctgttgatgcagttctttgcctaaatagccttcgtcgccaagaagatagtaattagatggatgggtattttctatcagttcaactgtctccctggcatcatgaactgatgcctttgttacgacataatcaagaatgtaaccgtcatcgctaacaatggcatgaactttgaaaccatagaagtaaattttcttggtggccttataaccaatgttggcataaccgcgaaaaattttagcacgatagtttcgaattggttggcaaacaggtaccggaaagctgtcaatgatcaagaactgtccattcaggtcaacctttttattcatttcttgccgtatctgataaatcaattgcaatagctgacgtgaacgccgattaaaacgtgagtgtgataaacaattgaaacattcacagaatcttctttgtgattcaattcctgtcttagcttgccagataagtaaagccaaaatcagactgtccgtagttttaatttgatcaatatttcgccgatgagtaaactcagccggtgcatacaaacgataccagtgccgacaaattatcactaaatctttaaaactaacttgtaaatggtggctaaaacgcttaagcttaaggcagttcaatcagatcagactcttttctattattactatttacaagtcgagtctaacaagattggacttttttattaactaaaacgatttaactagcaccacgcgtattcatatatattctcccttaatcaataaatggatagtcttcattaaagtaatgatcaataaaaatttgatgttgcttgttaaaaatcttggataatttatctttagaaaaatacttcagatcaagagtttcagagctaatctcttttgacattttttctactaattcaacagttactgcctgtgccacatcttgattaggataatgctggataaaattagttgaaacgcctaatagtgacttagttcttacttttaagccagtttcttctaaaaattctcgaacgcatgcttttggagctgattctccaaattctaaagcaccaccaggtaagccccatgcattaaaatctgatcttttttgaagtaagatttcattcttgctattagccaaaattccaccagcaaaatttagaataattggttcatgaccaactttttggcgtaaggtcttaatatagtttttaaccatcgctagtcctctacttgaatatcattcatcacaatttcaacttcatcgtctaaattaatctgactagtaaaagcatactcgggaataaaaccaagataatctttttcattccaccatgagcgcattgtttcttcaccaaaagaatgttcatgacgagttttatggcgtttcattgtttcttcaaacggaatatcaaaataataggcataaatttgatcaccaaaaagctgctgagattttttgaataaatcagcataccatttcgcattcaagataccttctaaaatagtgtaagaacagtgatgataaccatactcaagcaagttttctaataatggcaaagcaaatgtcttttctccgtctttaacattcagcatttctcttctaactgtatcttgtggaatcaatagtgtattgtgtggcaatcgacgatggatttctttagacagtgtagttttgccactgccagagtttcctcgaattataattaattttgatgtcatcatagaaatcttcactttcttaaaattaattcactgcatctctaattgttgcaaacttatcaaatgtataatctattataatctataccatgaattttaacaataggcagcattttccctttttgtcccatcaataatcctgcagaagcggctagcatgtcacagatagtttcaacattagttttatcttgatactgactttttcttaaaccagaaacaccatacaatccaattgctacttgagttgcaccttttttatcaattcttccatcactatcggtaattatgatagctactctgacttttaattgatcaaaaatatcatcactaattctcttagcaatttcatcacaatttttaggtaaaactattgcagtaccagcatcaattttatctacacctgcactagttaaaaacaaaccattcggcaaccacccaccaataaagttcttagatatctttagtttcttaccactcttatcttcggtttgatcaattataatctgaattagtcttggagcttttctaggtatttgctgatgcaaacgtaaggctaattgacttggattaatagaatttaagtgaacaaacagaccttcagatttagaaatcaatttagaagcaatacataaaacatcattatcgcgtatattaaatccttcatttttgattgtcctaattatttctgcacttaagttgcactttctctctattttcggaaaattatgcagcgcttcaattgtaatcatgactataacctcaaatcagatgttaatttgcccaaaacagtaatttcgtttctatcgcaatacttcaatgtttttatgatcggttaccatgatttatctggtatctttctcctttattaatggtattgttagcaaaacaacaccaaaatacactgcggatacaaaaaaacattacttttaagtctccaaatactttcataatactattgcttataaataatgaaatactaaccaagatctctgcaataaatgaaacagttgaaagcatagtcgacttattgctttctccataaatggcttcattactagtagctgaaatttgtcccgacatcattcccatcaatagttcaattaatagaaaaaggcaaagcagtaaatatttattttttagagtaccacttaatataaatgctccaatcatacttccagtattcaacaaagtaatcccttttgaattaaaggaagtagaaattttactaaataaaatcgaacctagaattaatgcacacataaataatgtataaactagtgaaagattaaagcctaatttttcaacataaataatcgaccagtagataaggataaactgcgttccacaatcataacccacattcagcaacaacaaaatccagaaatttctttttctaaaaaagccaacaatatttttaatattatatttatctttctttttactagaagccctattatctgaaaagataagaaacttgtcataagccaaataaaggctggatataacacaagtccaagcattgcgaaccatattagtgcagtatctttaattccaaatagccaagtcccaatatttccaccgattaatgtggttaaattcaaaataattatttgcatccccattagtttgctactaggggcaattttattttgttcctgtaagtcagttacataggcaagtaaagtacctgaattaagagctaagccaataccatataaaagctctgccgctgaaaagaaaaagaagtttctaaatagaattagaatgaaaaaactcgtggcaataactaaagatgataaagctaaaactttcaatcttccaattctatcagctaaatatcctgctggaagaagaccaaatacaataccgatattttgaaaagattttattgaaccaatatttgcatccgggattccatttttagcataaaataatgaaaaaattcctgacattgatgatcggaaaagtgtaaaaactgctgtaaaaactaaaaataaaattgcaattttaaaacttacactttttagcctcatgatcatcaactcctattattttacagtctcgcctgcggcatcatatcttgaatctgcttcttggcccgctttaatatttttcccggccatttttaccaaattgcccacctgcatatggctaatattaaagccagacaggcaattgactgctagagcagtattgcgataagtggcaacgctgcttacttctaagatgtttttgactgctaaaatactgtagcgcttgtatttgtcaaagcccattaattcatccaagggataccttgcttgtttgcctgggcagacatatcttcttctgacatacctaacttcgccaaaagccatattgattgagcgctcattcttcttatcaatctgatagccctgtgctttaaccttggtaatcatttcatcatcaactttagctaaagccaaggccatgatttccttaatcaggtttaagaagaaacagattatttttctttcacgcttaatataattatcttcagactttataatatttgcgatttcagttacaattgaattcataaaagaccagcttctaatgtgttttttgttcttaacatcagactactggtctttttgtttgagctcaagtccaaattcaaaggacttgggcttttttaattatttattcaacttaccgtaaaaaattatacacttagtgacgaaatttttgctattcaaagtgctcaaaaagagacgcgtaatcgttatctaaaaaaacaaaaagctatgttggcagaacatgatcttttacccgaaaaaaagcgcaaaccacgtgcccgcatgttatcagagctgaatttaaacaacgatgatgctattttaacttttgccaataaagttaaggttttcaccagtggacccgagttgtttgaccaaataattgctgatcttaagcaagctaaaacatcgattagtttagagttctacactttttataatgataatctaggaaagcgtgtcttacgggccttagaagaggcttctgctaaaggagtaaaagtcagagttatttatgatgtctctggctcacgtggtactaaacctgctttttttaatcatttaagagagcttggtggcgaagcacagcctttcatttctacttctaaaaagcattggtttactacaccacgactaaattatcatttacaccgcaaattaatcgtaatcgaccatcatattggctatattggtggctttaacatcggtgatcagtacgttaatcaatctaaaaaatttggtcattggcgcgatacacatttacgtgttgtgggtcaatcacctatcctaatggagacacgctttgccatggattggaatacttctatcagacgaactgcattacctaaatttgatctaagcgaattacatgcttttactgtcgaacgtaaagatcttgacaacgatgataacgtagcaatgcaaatcgtttcttcaggtcccgataaccaacattatggcattcgccgaggatatgagggcatcattgctggggctaaaaactatatctatattcaaacaccctatttaattcctgaagaatccattttagaagcattaattattgctgctaatagcggtgttgatgtacgcatcatgatcccttgcatgccagatcatccctttgtttaccgagctaccgaatattatgcaaaatatttagttgctcatggcgttaaaatttacaaatataatgatggcttcatccatgccaaaacaatggtttctggctccaatatctcatctgttggttcagccaatcaagacttcagaagttataccttaaacttcgaggttaacgcttttaattacaatattcaattaactcaagaacttaaacaaatttttgaaaaggacctagctagttgcagtcttctaactaatgaatactttaatcagcaatctaaatggcttaagtttaaacaatacttttcacgtctgttggcacctattttttagaaataataaaaccacgaagcaaaaacttcgtggtatttttttacagattattataaagatcctgcatttcatcatcttctggagctaacttaagatatctttctagcagttgttttgttatttcatcattattttgtacattgaaaaagattatcatttggcgcaaaaagtctggattatccttgaaatccggataagctagtaaaaattcgctctgtgctttctgaatatcatccaaatcctcatatgataatgccatattccaatgtgcctgtggctccacgctttcctcatctaagttactaaataaggcaatattctccttagcctggtgttcatgaacatataggttagatagctgcatacgtaaatcactattgtctggcgctacttttaaccccttttcaagtaagtcacgagctgtatccaattcattcaaattagctgctgcacgtgctcccattgaataaagtgtttcatccagttcattgtacgctaatcctgcttgagcagtcctcaatacttgttcattgtcatgctgatgatcataagcttgtgctaataatggatacgcatttacatagtcaggactttgctcaatcacttcatctaagaacttaattgcctgcttatcatcacctacagataagagaactaatcctgcttcatacttagaatcaatatctaaaatactatttgcatgttcacgaataactttggcagcttcttcataattacctaatttggcaaaagtcgcaaataatctttggtacagatttacttcactaaaagtactttgacgtttgattaaatcttgatataactcaagtgcttgttcataattaccacttaaatattcaatctctgctaaaccaaatttaatagcatcttcttctggagctaattgtagtgctcgtattaatttgtccttagctgtttctattaagccgttagtttggtaataatcagcttgtactaatagactatccaaataagctgaagagctctcagggacattatataaaagcgacagaccatcgtcatcatcgccatcatttaacataatctctgccaagtaaactttaaataaatcttctttaggaaatttagctattaaagctcgatatatttcttttgctaaatctgtaaaacctaagccagttaggttttctgctaaagatgacaagacctcgggagcatcattatctaaagcttcttttaaaaggtgtttgttttgtgaaaaatcatgattttgaattgcatctagtaattgttcagaataactcataatacctccaatcaagttaccattgtactaaaaaaagacgccggaacaaagtccaacgtcctatcacattagttaagctattacttaacggcatccttaagagctttacctggcttaaatgcaggtacttcactagctgggatttcgatttcatcaccagtttgtgggttacggcccttacgagcagcacggtgacgtacttcaaaagtaccaaaaccgattaattgtaccttttcacccttagcaaggttttcttgaattgaatcaaggatagcatcaacagtatttgcaacttgcttcttagttaacttagtttttgaagcaacttctgaaactaattcagccttatttgccatgaataattcacctcctgaatttgaacctaatgttcaaaaaatttttctttgtttaagctaaacaaggaaaaatgatcacaactaatcatgttccctaaaaacaaaaatatcacaaaaaccttataacaacaaggttttttatgatattttgcttatcttttatttacgtttacgtggtaaaatcttgattggtgtacccgtaaaatcaaagttttgtcgtaattgattaatcaaaaatcgttcatatgagaagtgcatcaattctggatcattcacaaatacaacaaaagtcggtggattcgtacttacttgggtcatgtaataaacacgcaatctcttacccttcaccattggagttggaactaacttacttgcttcaagcaacaaatcatttaagacactagattgaattctttgattttgattatcatagacttctttaaccatattaggaatttgatctaatctttgacctgtcttggcagaaacaaaaagaataggagcatagtccaaatattgaaattcatctctaatttcacgttcaaattctttagcgcttgtactattctttttcggcaaatcccatttgttaacgacaatgatgattccacgacccgcctcgtgagcatatccagccacatgcttgtcttgttctctaatgcctgtacttgcatcgaggacaagtaaaaccacgtctgaacgctcaatagcactcatagcgcgcattacagagtacttttctgtcttctcatacactttgcctcgtcttctgattccggcagtatcaacgaccttaaattttacaccatcatgagtaaacggcgtatcgacagcatcacgagttgttccttcttcattagcaacaattacccgatcttcaccaagtaatttgttaacaattgaagacttacctacatttggtcgaccaatcacgctaaaagaaataacatcatcagcttcagtatctttatcgtcaggaaaatcattaacaatctgatcaagcaaatcaccaataccagtaccatgactacttgaaacaggaatcggatcccccaatcctaaactatagaaatcataaatatcgcttcgctgttcaggattatcagctttatttacagctaaaataactggctttttagtacggtaaagaagatgagctattctttcgtctaaatctgtcacgtgatttaccacattggttaacatcacgataacatctgcttcttcaattgcaatttctgcctgagctctgatttcttcctcgatcttgccaccttcccaggtaataccaccagtatcgatcaaatcaaacttatgccccatccattcggcttgagcataattacgatctcgggtaacaccgggtttgtcctcaacaatagctaaacgttgattaattattctattgaaaagtgttgatttaccaacattgggttgaccaacaattgcaacaactggtaaaaccatttctcgccctcctttactaatctaaacataaataaaaaagccgactcaagtcggcttttttataaaatgactacttacggtcctttaattggtcaccaatgatgtcacctaatgcaaagccgttgtcgttatcactcatgtacttcttgtttactgaattttcgttacgtgaacgacgtggacgagaattatgattttctgaagaagcatttgagtcagcagccttgattgaaagtgagattcttctatcacttgggtcaatgttcaaaaccttaaccttaacactttgaccaacctttaaaacatcgcttggcttgtcaacatgcttgtttgagatttctgaaacgtgtaccaaaccttgaataccatcagcaacttcaacgaaagcaccaaagttagttaatgactttacttcaccttcaaaaatatcgccttcgtttaagtcagctgtagcttgttcaaatggagaaggttcagtttgcttaatagacagggaaatacgatgtctgtcattgtcgataccaatgaccttaaccttaacatcttgaccaacctttaaaacatcgcttggcttatcaacgtgcttgtaagaaatttctgaaatatgaactaaaccgtcaacaccaccaacatcgatgaatgcaccgaagttagtcaaacgtgaaaccttaccttcaacaacgtcaccaacaactaattgtgatgcaaccttgtcaaatgcttcttcacgttcttcttcaactaaatccttgtgtgaaaggattaagcggttcttgttaggatcaatttcggtaatcttaagtttcatagtcttaccaatgtaaggcttaagatctgaaacgtaacggtttgaaattaatgaagctggtaagaaaccacgtgtaccaacatcaacaattaaaccaccacgaactgatgaagttacagtaccttcgacagcatttccgtcttcgaagtctttttgtaacttgtcgtaggcttctctttcctttaagcgggtaactgagaagaagaattcaccattttccttgtcgccaccggctcttcttaatactaaggccttaaacttgtcaccaggcttaactaaatcacgtaagtctgcgttacggtctgaagtgtattcacgacgagtaatgacaccttcaacaccagcgttttcaacaccaacatcgatttggccgtcttcaatgtctaatacttcgacatcgacaatatctccgacctcaactccttgcatttgctttaatgcgtctaaaaattgattactgttttctgacatatgtacctcccaatatcatgtcccattttataggaaaccgagatatttttctactattttgtgctattttttctaatttttttgttttttttcgatttgagctaaaattgcctctacaacttcgtcaatcgacatgtttgtggtgtcaatttcaattgcatcatctgccttttttagcggtgaaattttgcggtgagaatctttataatctcttgctgcaatatctttttcaatttcatcaactgtttgatcagatttaataccacgctctttaaaatctaataaacgacgttcagcacgtgatcttgctgaagcaactaaaaagatcttaacttcagagttaggtaaaacagtcgtaccaatatcgcgaccatccataatgacatttgtcttgcctgccatttcacgttgcagacttaccattttttctcgtactttcggcaaagcggatacttccgaaacattagctgaaatttcaggcgttctaatttctttagaaacgtcctttccagctacatatactttttgctcaccattttcagatttcaattcaattccatcttcatcaatggcattcaagatacccgcttcatcaccataatctaagttatgattacgagcaatcactgtacatgcacgatacattgcccctgtgtctatatagacaaaggataatttacttgcaatgattttagcaactgtacttttacctgctgatgcaggaccatctactgctacttgcattctaataaaaaagagatcttatcatcgaccccttttatcctttctgaaagattatttcaacttaagtgtctgacctgcttcaatatttgaagagtctttaagattatttaatctggctaattcatcaacagtcaagccattcttttctgcaatttcatttaaagtatctccactttggactaaataagtcttaggagtagcagaactactagatgagcttgaactagccttttcagactttttcttgctacaagaagatgatgaggttttcttagtcttaacagacttggatgatttagaagaaaccttcttaactgtttgaacttcttcagctttttctgaatggcttgaagccaaacgatgaacaactgggataagtgcaattaaaataaccgctaaaattataataactgctatccaacgtgctgatccactaggctgactatcttgtgagcttcgcttttcagtaggtcgttcatagtgctgatatggcccggttgactttttatccatcaaaaattcctccattcacttaacggattaattttagcatattttaggatgctttgaatatgaaaaatcccatcaacttaaaaaattgatgggatgataacttaattcaaattaaatctcttacgaacgaatggcttaattgttttcaaggtagcttcaaacaataagtaaacagccacagcgttaattaatccttttaacaagttaaagggcatgataatactaaaaatgtaggttgacattgatggtaaatgcaataactgacccaagtaaactttctcagtaaagcttaacaaggcactatagctattaatagcaggcaagtttggtaccgctgttactgcgtaaataggagtcaaaacgaaggcattagccaatgacatcactgctgccattgcgataatcccaattaccaaaccacaaattggtttaactctgcccatcattgtcttgcggttatccgcactcacatttttacttaataaataaaatggaactgcaaatgacattgaagctaagaatgctgctagatttccaacaaggcttggtaatgcaaaaccactaaaaattaaactaagtaacattcgaattaaagcaataataactcccggtacaatgccaaaaataaacattccaattgtaataatgacatctgaaaaatcaaactttaagaaggcaactccaggcatgattggaaattcaaatttcataactacaaaagcaatacagccaattaaagcatatgcaatcacattagttaaactactattcttggatttagcttgatccataacttactttcctttcccaaaacaaaaggtctattgcttcagcaacagaccttaaaaagtgtagtaagtttttttagcctgtcttcttccatctagactttaactatcggtatctaacgattcaaccactgacgtgggtcgcggactttcaccgccggtcgggactttcaccctgccctgaagacaataaccttgaatatttaattacagttataatttagttcaattgcattaatttgtcaacttcatgcttcgataattcccgatattgccctgatgtaagcgaatccagagttaaaaaggcatatttttcacgagcaagcttatcaactaagtgacctactgctttaaacattcgcttaacttgatgataatgtccctcatgaattgtaatttggacaatttgtgtgtctttcttatgatcagttttcaatactttgaccttggcaggcgcagccttaaaatgatccaactttactccttgagtcaaggttttaatttcatcaggagttaaaatccctttaatcttggctacatagaccttagccacttcatttttagggtgcatcaataaatttgctaatttgccatcgttagtcattagcaataaacctgacgtatcataatctaatcttcctactggatacaaacgatatggtaaatcttcgaaataatcaactacagtttttctaccacgatcgtcttctgcagtcgaaacaacgccacgaggcttataaaacaaatacgtgtgtaggctttcccgctcaattggttcatcatcgactgtaatattactaaaagtatcgactttagtacctagcttagtaacaacatgcccatctactttaactcgaccggctacaatcattttttcagcttttcttcttgaagcgattcctgcttccgcaattactttttgtaatcgttctgccattttctatccctctttttctaaatgtttgtctgcgctaccttttgaatcgaataagtcaatctcctcaccatcagttgtatcctcaaagtcttcgattaacggtaaatcagccaaactttgataattaaaatattgtaaaaaataatcagttgtaacatacaacttaggatgacctggagcatcttttttgccgtcttgtttaattaatcctcgccaaatcaatgtctgtaaagctcctgatgaatttactccacgaatatcatcaatttctattctagtaattggttgtcgataagcaataattgagagaatttcaagtgctgattgactcaaattcttagttaaatctttttgaaaatacttttcaattatcttagctgtctgctgactagttgtcatcttataagtatttgcaatatgaattatttgcattcccgagtctggatcagccttcattttttgctgcaaacgagtgactaactgacctagctcttcaccatcaacttcaagtagttcaattagattttgctcctcaagcccattgtcacctgcgacatacaaaagagcttctaaatttgctagtttacttgccattcgtatcaattctttctaaatttaaatcaccgaattcacgtgcttgtgtaatctgaattaattgttttttacacaattctagtgtcgctaaaaataagccaataacatctgagatattctgcattttgtccgcgcaagcaaagaaactaacttgcctttttcgtttcaattgtccatgcaaaaaatccatcatctcattgatcggcgtttctgctactctaattgaagcggtatctggttgctgcaacttcaaacgatgtaagaccatcgtaaaagtcgtcgctaattcttgtgcagttatctgacccttaggcagcggttgaactttagcagtggttgatacactagcttctttagcaactgtaatcggtacttcttcattacgttctttaaaataagcagatattttcttaaacacagaatattgtaccaattgttgcactaattcgtctcttggatcttcatcaggttgaatatcatctacaaaatcgttttgaggcaacaaatactgtgatttaattcgcaataaagttgatgacatgacaaaatactcgcctgcaatttgtaaatttaagctttgcatttggcgcaagtattctaaatattgactagttatttgggcaattgggatatcataaatatcaattttttgcgattggatcaaatgcagtaataaatcaagtggtccttcaaaattcggtaattctaaagttaagttacttttgtccattatcttcttctaccgtttttaataaatttgtatattctggtacagcagttattcgtttatctggatattcgtgctttagttcatcaacaattttccgttcataactaatctcacgaaaaccaggagctaaagacaaatatctaataattacaaactgattagatacttgggttcctattacgcccaccatattattttgactattacgataaagatacaaaataaagtcattttcatcctgattaagcgtgatttcttcttttaagttttcgatatttttaaaatcaggtaaataggatagtaatcccattgctatcttctcataatcttttttatattgtattagcatttaatcacctaaagacgaggatgtgtcttctgataaacatttaaaatttgcttttgtgataaattggtatagatctgtgtcgtgctaatatcagaatgtcctaatatttcttgcactactcgcaaatctgcgccgttttctagcaaatgtgttgcaaacgtatgacgtaaagtgtgtggcgtgacatctttagtaattgccgccatttgacaatactttttgatcatctgccaaatagcctgtcgtgtaatcttttttcctcgattatttaaaaaaatatgttcatcgcttttccctacttgtaaaattagcggatcacgaacttcattttcatatttttttatccaatcaagagcaacaggactaattggaatcaatcgttctttttcgcctttaccaagaacccgaactaagcctaaatcgtcatgtaaatcctgcaactccaaattaattaattcgcttactctcattcccgtggcatataatgtctctaagatagcacgatcacgtatacctaactttcgtttagtatttggctgctcaagtagcctattcatttcagcttgagagagagctgtcggcaaacgacgttcttttttaggcaaatcgatttccaacattggatttaacttttgaatattttgccgagctaaccattgataaaatttacgcatgctagaaataagtcgactaattgagctggttgctttgttcaaatcacgctgccgagctaaaaacgcatccacatcgcttgcttcagttggccatgaagccataccttcattttctacaaaagtttgaaattcttctaaatcttgacgataagcattaattgtattatcacttaatcctcgttcaacttgactatagcgtaaataatcatcaatttgatcttttaaattaatcttctccattatcgttctcttctggatccttaattaaagtaatcgtacctgctgttttatcttcttcaattaatccagccttgagcaaatgaccgaccgcacgtttaaaagctgattttgaaataccaaagtatgatttaatttcttgtgcacttgatttgtcatagaaaggtagagtcttggtttctcttctccgcaaactcatcaaaatcatttgcgcatcatcatcaatttcttcaaaagcacgaggcaaagcactcaaattcaaacgtccatattgactgacaccgactactctacccttgaattgctcacctagtctcataggacgtggcatctgcgattcatgtacaaagccaagataataatcactagttaaaacaaatgctcctatctctcgtgtaacataaaccgttgcaaagacattttcattattcattccacgtggaaagttagcagctaattggtcaaaaatattttcatctgctagcttagcccaaatacgatctttttcgtcagtttctaatcttactaaaagtcgatcatcacgtcgaggccatctttctttttctctaggaagatcatccattgataaaacaacgtctttatcaggtagacctacatcaacaaagacgcctaagcctggacgtacctcggttacttttccccaaccatattgatcgggttgcgcgaatggcaaaaattgtgtcatttctcgatcatgacttttattatcataaataaaaccttcgacttcatctccaattttaggaatatcatcttgcgtaatctcgatcttcttcaattcataagtcagtccatcaatttgaacataataagctttatcgttttcgtcagtaatttttcctttacgaactgttccaagcatttaaaaatctcctactttacatattcttacatataagtataagagatttttatgcaaaataaaatagccagcacttaagctggctattttttgattagctaatctatctaaattatattcttaaaattaaaggtttgagattttgccttggtagatagcaccacgacgagcgtcaacagtaatagttgaaccatcagaaatcttgtcagtagcgtcagtagcaccaacaacaactgggatacctaatgataaaccgataactgcggcatgtgaagttaaacctgaagcttctacaactaagcctgaagctttcttgatagctgggttgtagtctgggtcagtagtcttagcaactaagatgtcgccttccttaaccttgctatttgcttcttcagctgagttagctacaacagccttgccgataactgaaccgttaccaacacctaagccttgaactaacttgttaccgatgatttgtaacttcattaagttagttgtacctgagtcaccaagtggagtacctgcaacgataattacaaggtcgccatcctttacgtaacccttttccttagctaccttagcagccatttcaaacatgtcatcagttgacttaggcttttcagtcaatactggttgtacaccccaaacgatacccaatgagtgttgaaccttttcgtcaaaggtcatagcaataatgtcagcatttggacggtacttagaaatcatacgtgcagtgtaacctgagttagttgcagtaatgatagtcttaacacctaattcttgagcagtacgtacaactgattcaccgatagcttcagttacgtttgaacccttgtaagcttcgaatctttgaagagctaaagtattacgcttaagcatttgcttttcagtacgttcgtcaatttcagccatagccttaacagccttaactgggtaaagaccatttgctgattcacctgaaagcatagttgcgtcagtaccatcaagaacagcgttagcaacgtctgaaacttcggcacgagttggacgtgggttttcttgcattgagtcaagcatttgagtagcagtaataactggcttaccaagtgcgttagccttgcggattaggctcttttgtacaaatggaacttccataaatggaatttcaacacccatgtcaccacgagcaaccattaaaccatctgaaacttgcaaaatttcgtctgcgttgtcgataccttcttgagattcaatctttgggaagatcttaacgtagtctgcacctgcttcttcacaaagcttacggatgtctaagatatcttgagccttacgtgcaaatgaagcagtaatgaagttaataccatagttcaaaccaaacttaatgtcatcagtatccttttcagtaatacctggaaggcgaatttcaacaccaggagcgttaacacccttctttgaaccgattacaccagtgttttgagcttcacaaacaagttctctctttgagtcgtccttttccttgatcaaaaggtcaaccaaaccatcatcgattaatacgtgaccaccaacgtgggtatcatcgtataaaccgtcgtaggtaacgtggatcatgtccttgttacccttcttagtggcatccattgatacacggatcatgtcaccagtattaatagtgaacttgccaccttcttgttcagtggttctgatttcagcacccttagtgtcaaggtcgataccaagaagtaaaccagtatccttttccacttgacgaaccatcttcatacgagcaaggtgttctgggtggtcaccgtgtgagaagttgaaacggaatacgtttgcaccagccttagctaaagcagtaatagtttcaatatcgtttgaagctggccctaaagtactaacaatcttagttttcttcattattaaaaaaatcctctccaaaaatcaactaaattaatatttagtcatttcttcatttacatccaataacgcataatcaccttggtgtttaccgtcaaacaaatcaagaatgtcgtgggtattaagttcaccattctccatgccgacagctaaaccgcccttcccatcgagaagtaacttaacagcataattacccatcttagtagcattaactctatctgtaacagtaggtgagccaccacgttgcatatgcgcaaggacattagcacgagcatcaaagtcaccatatttaaggagttcgtccttaaacttatcagcagccataacgccttctgctaaaacaatgataccatgatctttgccatctgcaaaaccacgagtaagagtttctgcaatttccttaacatcgtatgaacgttcaggaattacaattgcgtctgctccacttgctacaccgacacgcatagcgatatcaccacattcacgacccattacattaacaacgaatacgcggtggtgactgcttgcagtatcacgaattttatcgatagcatccatagcagtacgacaagcagaatcaaagccgatcgtgtagtcagtataaggaatatcattatcgatagttcctggtaaaccaactgagtttacgccgtggcgagtcaaggctaaagcaccatggtatgaaccgtcaccgccaattacgataaccgcatcaataccgtgtttctttaattgctcaacacccttttgttgcacttcttcttgtgcaaattcagggaaacgagcactgtacaagaaagtaccgccttcactaatcttgtggtcaacattttccgtggtaagcggaacaaagtcacctgcaaccaaaccagcgaaaccataacgaattccaaagacttcaagcccatgatggatagcagtcttcgtcacagctctaattgctgcattcataccaggggcgtctccgccactagttaaaataccaatccgtttcatgaattcacctcatcatgattattttgtgtaatttctcacatcacataaatattaacattttttaggcaaaaaagctcacaaaaattgggctaatttatgctttctttccgtatttaagtttgttagcacttacatccatcgtcaaagatagctttgtaatttgaactttattctttaaaattaacttttcgcaaattggttaagaaatactgttttttattttggtcaaatcgatcaccttgaaccttgactcctagtaaataaatatctccttcttttaaaatagagccaaatttttcataagccggtggaaaaataataatttcttgttcgctagatgtatcagcaaaactagcaaaagccattgtttttccatttttggtcctaatttgctttaacttcattaatttacccacgctaataccactatcatttaactgaaattgattcaatggtctagcgttaaatttttgtgcatatttttgtacagctattagaggagtagttgttgtagtaaagcctaaagctttctcttccatttctgctttttgggcagcagtcggtggctcagcaggcttaagtggtgcatcccccagaatctcagataaagacatattttgtcccgttaattgcacattagcaattacatctttgcagttaagcaataactcattgcgattatcttcgattgagtcaaatgctccagccataatcaatgcttcaattgcgtctacttgtaagaacttagcatcgattctacgcaaaaaatcattaaaagacttatacggtttagtattggcagctatttccttagcaaaatcaagacgtaatcctttaattgcttttaaaccaactaaaatcttgccatcttgtaaagtatagtctaattggctgtgattgatatcaggcggcaaaatacgaactccagcttcctgagcttgcatcgaatagctttgcgctttagcagacgttgatgaattgagcatcgctgtgtaaaatgcagcaggataatgaaccttcaaataagctagccaaaaggcaatcttggtatatgccaccgcgtgtgaacggttaaaaccatagttagcaaattgctctatataatgataaactcgctcacctacttctttaggatgaccttttttgaccgtaccagcaataaattttccacgttcttgctcaatgacattctgattctttttagacatcgcacgtcgtaaaatatcggcttcacccaatgaaaatcctgccaggatttgagctgtttgcatgacttgttcctgataaaccaaaattccataagttgattgtaaaatttgctttaaactgggatcaggataatgcacagtagccgtaccattttttcttgcaacaaatgcgtcaatattttgcattggacctggacggtataaagcgttcaccgctactaggtcctcaaaattgtcgggatgcaatttacgcaaaacaccacgaatcccaccagattcaaattggaagactgcatctgttttaccttgttgaaacagttccattgttttgggatcatttaacggaattgtattaggatctagctttacaccttgctgccgcactaaagctaaaatattgcctaaaactgtcaaattgcgcaatcccaaaaagtcgatctttagcaaacctaatgattcaacatattttttggtttgctgagttacaggaatgccgaaaggaccagcctgcaatcccgaaatgccagcaatcgaatcatcactaatcaccaatccagccgcatgaatagaataatgccttggcaatccctcaagtcctaaagcagtcttaaataacaatttattctcaggcgttgcatcaaccaataatcttagttctctagactcttgatatgctttttttaatcccattttatctttagagtacgggattgcgtgagtccacttagtgatttctggtcctgttaagccaaaaacccggccaacgtctcttaatacttgtttagcagccattgtaccaaaagtcaaaatttgagcagcatgatccatgccatacttttgatacatatacttaattactgtattccgttgaatatcaggaatgtccagatcaatatcaggcatctcatgacgagccggatttaaaaaacgctcaaacagtaaattatattggatgggatcaacttcagtgatacgcaaagagtatgaaaccagtgaaccacaagctgaaccacgtcctggaccagtagtaatttttactcggtgacaatagttaattacatcccatacaatcaaaaaataatcatcgaaccccatctgattgatgactcgtaattcataatttaatcttttctgatactcggctggaatacttttttgaccaaagcgcgcttgtaaaccagtttgagccaaataacgcaaatattcttctgaagtcggaaacttatcttgatgatatttaggtaagaccggtttttgaaagatcacttcagcattacatttctgagcaattttccaagtattattaattgcatcatccaagtcatattgatgatagcgttctaaaacattttgtgcagaatctaaataatgcgaaccagcttgcttagctagtggcaatatatcttgcaatttatctcccttagcaatcgcacgcaaagttttttgtaaaaattgctcacgtggccgtaaatattgactatcttccactgcaactaaagataattcaaattgcttagctaatccacggacataatcaatgtaatctatacttgcttttgaagcatatacacccaaataaagatcaaacgttaacttctttagttggcgaacataatcactgcctaatgcctgatttgtatcatgcagcgccattaattcactttttagattagctggtacgataatcaacaaatcatctaaatatttggttaattcattcagcgttaagaccttatcgttttgcccattttccgttaacaaatttaccgcgctagaaagtcgcaataaattatgatagcccttatttgttttggcaaaaactagcaaatcatatttttgggtgctatcaaccaaaccatttaaacgcagttgcatcccaagaagtggtttaattcccgcctttttagccaactcataaaaattgaccaaaccataagtcacgttcacgtcggctaaaccaaccacaggatagcccttctctttagcgtcttttatcaaatcacttaccttggttggactacttaaaagcgtaaaggagcttatgttttgaagtgctgctacttgcataaattaaccacctttcgtcattacaaacattaaattaagtataccaaattgaaccaatcaggtttgaatttgcgcttcatttttgataaaatcttacacgaaagaaggaatcattatgggtcgttatatcatcacaactgtatggagcgtaatctacatgttagttgtaggctttattgctggtcctttaacccgaagtgcttcattcaacggcacagatttaagaaattgtgtaatcgttgggatcatttttggtattcttttctcagcaattattgcgactattactgctcgttcacacaaagataatagtaaatacagtaagttaaaataattattcaatctattcaaaaaagacgtgagatgtttttattctcacgtctttttcgtttggtttagtaaaacttataattcttttttgtatctacttcgactggtccatgagtcaaatattcgctaaacatttgtacatagtccttatccaaagtggtttcaattttgtccatactatattcaggataaaatcccccacccatagcacgatagttgttaactgctaaatgataaatctgatcatctttgattggcttaccgtgcaaagttagtttagtcagccgttcacctactggtctggataaatccgcttcatattcgactggataaaagacgtcaaaatgatacaacattggcttaggcttaatccatcgatcaataaagccaatgtttcctgcttcatctttcttcaaaaagccagcagagtgctcaataatatgacgtaattctttaccagtcagcttcacacgacacaactgattagcatacggataatttaacaaaacatctctcatagtaatggtcttatcaaatcccttagctgtctcactcatcactgcagttgccgaaacatcagctttagtaaaccataattgcatttgttggattaaattaataaatggcgcgccttctattctgcctttcattgcattttcaattcgagcaggtttatctaaatgtgcaattggttgatctagccatttttgtgttcttttatccaagtcagatacaatatcaacaattacaggatcaggatcataatctttagtgtcaatcaacttagtggacattgatttgattttcttagtatcatcatcaatatcaagaaccacttcagctacagcttcaccgcgataacctggttgaacaatagcagtatcgcgtgtaaccaaatttaagcgccgatgctggtgacctgtcaataggacatcaacttctggaattttggttaaaatctgataaccttcattttcaccacgattaggttcagtcgccttaccagtttcaggatcgctttcaaagccaccatgatacatcacagctaaaatatcaacctgagggcgtaatattttggcataatgcttaattttttcgtaagcagaggcaaactttaagccttttacattttctttaggttcccaatgtgggatatattgcgttgtaatccccaataaaccaatctttaagccatttctcttgataatagtgtattctctaccaaaaaatggaacttctgtttctgcatccagtacattatcattaatgattggtgcctcattgttatcaacatagtagcttaaataatctaatccaaagttaaaatcatggttacctaaacagcgagcatcataccccactgcattataagcttgcgtaaaaatacgtaaatcactataatcaccagttgaatgagcataggaagcaagtggtgagccttgcaaacaatcacctgcatcggtaactagaacattgttatcaccatactttttcttttcagatttaataactgagctaactctactcaaactaaaaggagcatgatagtcggttttattttggtaatcagttggcaacaaaaatccatgtgtatcactagaatgtaaaaatactaaatacatgtttgttctcctatattattattgtgcgttaactaaagcatttatcaccaatttaatggttaatatgctcactgtttgttagttttatttagccattttttagtattgttttcaactacaaattactacgtctttcttcaatatacttttcaatttgttctaaatcagcttcagtagcaagatttaaaatgaagctctttgttgttgaacgtttattaatgtaaagcttacgagccttatttttatcatcccaccttttatttgccctttttcttgcttcacttaattctgccattagaatctcactcctagccataataaaattcttaaaatcaaaaaggtaaatgcgctaatataaattgccttcgttaaaaatttgtcccaattaatttttttcatttgtattttctcctattctaaattaagatataggaaatagaggatttcaatcccctattcctattatttattttgtttaaaagctaaagcttgattccgaataattgaaggattgttgcgagatttgcaagtaactcaataatccaaaaaaatgttttaagaatcagctttagctttttctttctgcggtaggctttccgcataggatcacctcctagctccgattcccttacctcctttcactatatataatacacgcaaaagcgtgtaatgtaaataaatatttctaaaaaaacacgcaaaaaagaccgctctgggacaatgatcctagggcggtctttgcgatatttggagcttttcaactccttttttattcaattacttttaaaaatttacctggtacccactgtttatcggttcccagcttgtagcatttcatgcctttaattgacttcacgtcaaagtacttccatcttgtatttgtcttaatgtacttgccagtgtaatgacctgtgctgtctattagctgaatcatccagctaggattacggttaatgattggagcatataccacgccgttctttttttctggttttggcttaggtttttcggtcggcttagctgccttatgtacagtcgtagtttctttgtggaggtcaatcagtgagatattaccgtccacgccaagcccacaccagttgtcacagaattgccaaatggctacaccgtccattgatggaaaatagttaaagtttggcgtatatgctagatcagttggataagacgctacccagatgcaagtgccgaatttcttcacgacttgcttagtatcaattgcagttctaagtaaacttgcaccagagtacaagcctactttataaccagcatcgtgacaaattttcataaaagctaaaatcgccttggtacttgccgccttaccaccagtaacacaattgccactaccagtttcccagtcaagccataagtagcgcttcttgctgatattcccagtttgggcacgactcacaaaaaactttgcttcagctttagcacgactggcgttataaccgaaagtcgcaaagtgataagcgtggacgtacatgtgattagcatgtaatgacttaatttggtaatgagctttaggattaatgtaacccgtaccttcagtcagtttgataatgccgaattttgcaccagcattatgataagcactcatgctagtgccttgatatacagccgcatcaattcctagttgtctacttgccatctgcagtcacatccttagctggttctgctggagcaggactttcaggctttggcaattgatcaactggttgcatgatgtctttttcgtccacatcttgatttacagcaggatccttttccaattcttcaacgtcggctaagcgcatagcagctacagctttttcaagagcgccatagatcatgttagctgttacgtcattgattcccatataatgtagagcttgattgatcagttcataacccatttggcgcttttctttactagtaccacccaagaactctacttcatggacagcattagttgcaatcttgcctaaaacatcataggcttggccagcacgggttgtgcggttaatttttgccttgttgcgagcataggcacccgcaattacagcgataaagtaactcgctacagtaatacctaagtaaatccaatctttaatcgtcattttctaattcctccaatttcttttttaatcggtcattttctttttcaactttaagccatcttttacgatatagctccacatcttcagccttctgcttaatttctttgtctttctcagctagcgtgctggcaagcgtattttgtttgctgctactaaatactttgtagaaaagggtcaccgcacttatcagacccccgacagcagttatcagatatcctatcacgttcccaatatctttcatgcggcacctccttaggcgtcgctagctgtcagatagacaaagccaaaaatgattaagtcgccccaagcagagtgccccattcgataataagacgtgaaaatgccatgcgtgatttgcagtaaagctaagaccatgcacacaactccagccaacactaaaaatacgttgctgacgataatcagctggatttttcgcttggttgatcgcatgtatggcactaaaaaagccgttatcatcaacaaggcacccaaaaggattaaccctaagtcgatatagcgactattttcaatactttgaaattgcggcggatagataaaatagtgactatcatgaaacagccaaacacctttacctaaaataaaaagaccaattaacagttcacaatttctaattgttaatttggccttccactggtttagcttcttcattgctaccaccaacgatttcttggtattcagcttgagtaattaagcccatatcaatgtaacttcttaattcatcttgactgataaaatcgttatcaaattcaaacttgtaaatctcaaacattacttattacctccttcaattgctggtgtggtgtttcgtgttggttcagtaggttgagtagcaggttgagcttgtttctttaaatcttgcacttcttgcattaacttgcctgtttgaacgtttgacatagtaaccaaagtagtaagcttatctaatttcttatcaagttcatcatttgattgagtatttgattgactatttgattttaattcagtaacagctttttgaacgtcttccacagtatgaagtagtgcttcacttgatgtgtctacccattcatgagctgtgtaatcatatctttgatgtgtaaagtttggatttggagttttagttacataaggatagcctttattactcatgtcctttgtggtggtgtatggaccatcacattctctgtattctccattaataattccagagatccaaaatgtattttcatttaattctgccattttattttcctttcttgagcttaaaaaaatagacggttttagtgattaaaaaccgtctaatcattgatttaaagccattcttgtttttgctcgagactggctcaatttattcaaaaatccactcaaggtggaccgtgattatctttcatttttatctccttactttttgtcactttgtcgtccaatatcaacgaccgcttaaatgtggactattatttttatcttctattttaaacttcaattacaaaattaactttatgagtaacgcttactttccaactgttgattgcagaaaatccgctattgttgccgaccaaaacaatcaaatatttggcttctcccacatgtaaggtaatttcattactcgactcccatggctcatcaggattataaacttttgcaccattttctggttgatctgtcaaataataacaccataaaaaattgcttccattttctaaagggtcaacgactattttaagatcagtgttcggcactaatgggacaaaatctgatgtatagcgtgcattaggagtcccatagccagtgagatttaaagttgcatttgttgcattggcagattgatttactgtccaattaactaaatcttcggtagcatcttgctctaaagttttaaagccatgaccatcaataaaaagcatttacgccacctccaataaaaatattagtcatataaaactcccttctgatgtataaaaaaggcggtttgtaccgctaaaatgcgctgtcgtttatcatgaacgacagctttaattcttcgatgaatatctattgggtgctgccatctatagaccagcacctacatcttgagaagtaaagccatacaccgccaataccagattagtatatgaatagcctaaggtgtcgtcataatcggattttgtacggacagctaatgtggtgttgtccgtaaaccaaactgacatagctccggtactgccttcattatcacttcgcttgttatttatttcaccgtgtttcaataacggtgtgtgaaaattgttttcaagagtattattgttagcatcttgataaaatacctttacaataatttggtaatattgaacatccgaatactttgcatcagcttgactaaaatattttgtcatatcaatagtaaaagattgatggttccattcactgttattatcaccatcaatataaaaaatatttaggttttctgctccatttccattaagaaactcattttcacctagagcataacctagaacttttttgccatttatcgttaaagccatacggtcaccttctttattctgttatttcatacaacgtatttggatctttagtagcaagcttatcgtagtcagctttactaattacggtaggctttttcatatatcctgtttcaattgctgtaactctgttgttagtgttattcagatccgtttggttaaccttgcttgataaatcaacagtgatattagcattgccactatcatcagggcttatctttgcgccaccgtttacagtgatagttttaagcttaccagcattagaaattaaagtcttaagattgtcaacaatcttgtcaatatcagttttaaggtaaacgtcagcagtgttagccttaccatcaaccacactttgcaagcttgcaagaccgctaacttgagtttgaagtgattgcaatgattcatacaagcttgtaatagtgactgttttatcaccaataacagccgaagtcggtccatcatcaggatcataaataccaattaccagtgatccgtcatctgctagtttcttacttgcatcataagccgcctgtggactgtcacacttgacaaacgacagcttagtggcaagtttttgtgttgtttcagacttagtaaagtgatctgtattaatatttccgtttgaatcaggttgaatattatctacggattttaccttaccagcttgttgcagtcttaaatcagtttcttccttagtgtagtaatttttaatggcgtccactgtcacgaattttgagaagtctaccttatcaaattgttgtttcaaggaatccatggatgctacagtatcagaaacttgcttacttacagtagtaagtttttggtcattttcgctaatgctgtctttaagtggctgaacagtatcattgaaatctttaactgtggaagtcttccatgcgttatagtctgcctgcaaatcagcaagtgctttagtcttatcatcgtttaattgttttaaagcagcatcacgttgatcagtaattgacttaacagctgcagttatgtcagcttgattactggttttaagatcagctaactgcttagtagctgcatcattaatagccttttcttgagcttgccagcttgcagctaatgtattgtacttatttgagtaatcagtaaaatcactattaatcttagtaagtactgcttgtgcttgttgttgtgcattacttgaatctttattcaattgatcaatagtagcttgtgttttttgagtagcacctagcaggtggttttccatagcaataagactacttacataactatcattgataggcttaacagttggatcaaccttaacttgaaaatagaaatcttgtgtagtatcaacaatggtgtcatcttgcttgatttgaaagaaacaagtgccactggctgtataacattggtgagtcatttgataactaaagtgtcctttagtttgatcaatcatgttgaatttaccactttgctcaccagtaccatcatcagcaactacacgatcactctctttaatttctgaaaatgaaacatttttacctgttaggtcgtatggtgaatcatcttcatttaaaattgttacatccagcactaaacctttttcagtggaacgtaaaaccctcgtatcgtctgacacgggggttattgatttatctgtttttaatgttatcggtcttaggctcacttgatttcaccttctttccacgaatttcttgaagttgagcatttcttaaccttaaactttgattttctttttctagttttgctattttaatggattggtttgcaataatagttcccaattcatttgctacatattgttctaatgtgttcatttttataaattccaatacttacttggtcctcgccaatatcgcttaatccatgaacctaatacaggttgatcactgcttgttacaacaacattcctaccaccaatctgtgcttgattaggtccaatgtgtgtaatagcaccactatttttatcatgaatatttactgatccagatcctaaattcaaagtataatttggagaatctaaactcaaaccatcaatttcctgactaggatttagtaaattagtggcatctccaaccgcaattgaaatgccatggttttcaacgtgtaaaacaccgttaatagttcccaaactcgtaattgtatcagtattaatgtgtgatgcatccaaaatagggatatgagcttgatcaacaaagaaattgccagttacttcaccacttgaatcatcaataccaaataaagcatgtggattgccataaatatcatggaaactaagacctaagccattaaattccatataagagccatcattgtttttagctctaattgccatgacattattccaactggtagagccatcacttgaaataggttcaagcataccgccaccgcctgattttaagaaattatcaaaactatcaatgttgttagccatttcttgcatgtgtttagcaaatactttaactgattctccaagttctagtttttgcttaccagtctttttatcagtgacgtattgtgcatcccctagttgaaccataaggttttcccatgcttgttcttgagatgacccctgcaaagttaatgcatggtgaacagcaccaatgaatgaatttgatctagcaattgcttgccgtgtggaagtaatcttttcattagttctatcttcacttgcctgaactaataggtgttcatagctagtaggtaaatcacctaaagttacatttaaaaaaacgtgggctaaacagtcccacgttgtagctgtaacttcagctttttcagtaatttcataatcaggaaaactaacatccacatagtcataaagactaagctgcgtaaaatcttgatcattgtctgacatgtcttgatagtcaagtgatgtctgaacctgcatatgaccatatctgtgttcaattagataattcttaccaatttcagtagcttgatcaatgtcagcttgagtagcaacaaaactaccatcagattgttgaccgcttaaatcttgatcatcgtgtttgaagtaaccactaatatcaacagtattaacgctatcaatgttaggatttacaccaaatccgttagcatataatggaccaactttaactattacttctttcttagattgatcaacattagcactgtagtttgtatcagtatcatcagaattatccttatcagcatctgcagcattgatttttgaatttttatcatcaatgtcatcttcacaaagccatccagttttaccatgataagtgacttcaatataagttttgccatcaccagatttggcttcatgaccgttaacaacttgaaaactttcaccgttgggaattgaccagtttaaagcatcatttttatcaggtgttgcataaatttcaaccttagaatgatcttgaagttgcttattaagaaaatcgtcaaagctatgtggttttactgaaccatctttaacataactaattgatccagagcttacccaaccatgtgaagtgtgcatgtaagtcttaccgccttgagtgattgtcttatcaatagtagacattccttttttagcggtaactttaaccttcttctgcttttctttcaaataagaaccattagcaactttatgtttatgctttcctttgcctacccatttccatgcctttttctgtgatccatgcttaataacagttttgttagtagataccattttatgatctttggtgaagtggtactttacagcaccatctttaacataaccataaccagagttgctgtattgacggtaacttccttcttcagaaagtgataggtgcggtccgtataaccattgatgcggtccaatgcgataccacaaatcaccatttgaattacgttcaatcatgtcataatcaataacctgcccattggagacagtccaaccagggattctataatgatcaggtccgatttcaggtgaatagtaaacatgaatagaaccaccaggcttataagctacaacagcagacccatgaacagtaacacgagaacctttcccttcagaatctaatggattactacttttaacagtaatagttcctgaaacatcattaattgcataagcaccagtagtatcaaaattaatccatttagagtcaatccaacctccaccatcacttgatgaaattggataccagccatcagaattaacagtattaatttgatatttaccatcaggagtaaaactaccatcattaacaattgtacctagatgcagtttcataccgttttgtaaagtgccaataactttttgaccttcaacagggcagtcatagatacttacctgacctccagccatgtaagtaatacctacactatcataatcactttgccatgttgcccaaccagtccagtcgcttttagcaattgcttgaccaggtacatatttagcaataaatactgcgccagtaaacatattttgaatgtttttatcttgactgaaggtggatttaatatttttaccataagccactttaatgcctgaatcatgaccaatacgacttgaatgatgaatattccaattgtcaaagtcaaattcaccaccaaatagccctaaaactgactgtgtagcagtatcaccttcctgatcaggatcaataaataaattacttgcctgttgaccgccttcaatgttcacattacttacagtattaacatcagaatcaaaagcaaattctctctgtggttgcatttgattaagaatctgattacctaagtcttgtgcggatgcaccatttaattgaattgtatcagctaccgttgaaccattaagcagagctgtaatatgttctgcttctacaacaacgttatccaattcaggagtaatatgagtgattttaaataattggtgaacatgtttaggatcgcaatcttccataatccacttgttaggctgaatttctttttgatgtagaccacttcttggataagtcattgttaaagtccaatattggtttttactaccattaacttgacaatcaataacatcagggagtggtgtaccactagctgtaagatcatcagccaaactgttatataaatatggtattgtcattaaatcggagtagtcttgataatcaacttcagagattgtgcctatagttagtttcattaaattagcctcctccaattaggtttatattcagctttagtgatagtagctccattttcagcagtaacagtgattgtattttgacccttccacaattggggaggatcaaggttaggaaaatgagtttgtgtgttatataaattgcctttggcatcataggtgtcaccagtttcacctgataaccaaaattcgccctccatattttcaaatgtgtaaggtaaatcattaacgtaaagggtaaaactaccgttagctataaaatgccaatctggtattgctgaccatttttcttcaccaacaactatttcactatcaggcaatggaatataagcaatcccatcaatgcgatattgaaacggttcacaataaaaaggtattgcacatgtaccaacaaaatcactggttacatctttagtaacagtgaatggatctttaacaatagctttaaacacatatgttggatcagcagtgaatttaaggtattgatatctcattcgcccatcaggatcagttggagtagaaagccaatcagttacagatcgttcccaatcaaaccaaccacgttcaggtggtctaaggatttgcagattaaaggtttcagtcacattttgataggattggttattttgtaagaaatcgccatttctacctttaatatgactaggatcaatatctggagttggatgaattaagtcccacggcttttgtacaaccatgccaaaatctgttgaagcatggtcttgaaaaattagctttatatcatcatctaaatcttgcacttaatccccttctttctttaatcatgtcttgcctacgatcagatttatagaatggctcaataacctcccaaagctttcttccttcaggagtagtaagcgtaatgtgaacatcatgactttgaacactcattttttgtaaaactaaaagcatggcttgtaataagtcatgctcatctttttcatctttattagaaatacgttgttggttagcatttaaattactgttagctgtaagaatacctacagccttgccaattaattcccacgcacgagtagacttacttggaatcaatggaacagccatttcaggtcctgcttcaccaaaaatacttggtgaacttgcaataccaccattagcgtaccaattatgtgcttttctaaatcgaacagcattagcaaccgtaccataacgatcatgaatataatccataatacccattaattgtgcaataggattgctcttagaaccatgtctagtgtagtaatgcaagttatagctttgcatctgtcctaaaccataagtaccagaacttgggttaacaatatgaggattccagccagattctgagcttacaatccagttaatgcttgaccaatctttttcgggaatgtgagcttgtttcatccaatgtgcgtggtcaccagttggtttaccagccattgaaccttcattttctgaaagatgatcaccaatccagttaagtgccttaccacctaattcacgtttagccaaagctaacaaactaggcttaattttaggttgatttttagcttgatcatgaagagccttaacacggtagtaaccataacccatgctcattgcatcagatattttactgatacgtgcataaggtggcgtttcgttaaacattgtgcccttagctgggttattgataataccaacgtgaccagctgcaccagtaccatgaccaaagatgactaaatcaccaggttcagtcttagataagttcttacctaagtattgaacacctgatgattcttgcatagcaacagtagtacgaccaatattaattccaaaatgtctaagtgcttgcataaccatacctgaacagtcagataaggtctttgatgcagcacccatttgatacttaacacgatcaaatgtttctttagcataacgtaagaatgcagcacgtgaaccgccacctgaaccaatggctttattaataaccgtccacatagcttgagaccacggattaccataatgagtaccagagtttttacttaaatcagtagcgccttgagttaaatcagaacctacatcatgtaagttttgagtaaacatattcttaaagctttcggcaaagtgttttaagctattttcagctaattttctaagtttttccttattgataccagtaccgcttgcgaagtgtggaagagagagtgattgagtttgaacaccattaagtacaccccaaccttttctcaataacatcttatgattattcccatgaggaataataatatcattttgatcggttacaactgcttcctgtcgtggaccagtagtagcatcattaactactgctaaagtatcatgagttaatctaccgcttgcatcagtacctttagcaaaatgcactggattgataacagaactattgccaccgaattgtttcaaagtgctgtcaataccacgaataccacggttaatctgtctgattgtgccacgcatagcatcactagcatagccaatcattttatgcattgcaccgccaaaaccacgagcagtagcagtgcctaatttaataacgccatcgtgcaaacgtttgattgattcataagattttttgtaaagattactaaaatcttgttcagtggattttctgatcttatcagtctctttatcgacatttgatgtcatcgtcttaaaatctttagcagttgctttagacatgctagagatcttcttggtgaaattgcctttgccttcgagtgacttaacagccttttcagcctgcctagaaatttgttcgccaaacttatctttacttgcagatttggctaaaacattcagacgtttttcagttgtatcaatgcttttatgtagtgatctaagttcatgagtgcctttagttttaacactaacagtactctttttgcctttaaccttcttaattgctttaactaaggatttaacagatttagcacctttggttttaacaaaaaacttgtgagtgccacccttgatacgcttcatagctttttcaagagctttgatctgcttagtgcccttcactttagcagctacagcaattgacttagaagataagcctttaagtgacacaccagaaacactgatacttggtgcagaaatacgacttgaaccactagaatatgagcgtcttgcggatgttgatcctcttttagttgatttacgtttcttagtcttacgctttttagttttcttctttgttttaggagcagtagtaagcttcttaaatagagtattactgatccacttagatttaccaattctgctatcagcaccaattaacaatccttcatccacaagcgtttcaccgtagtgaggattagttttagcaacagctttacggtcttggttgatgcgactagttaatttgtttaactgtgcaattaagcctttggtatttctgcctttcttaagagcatttctaatttccttagctacttttgctctatcggctttatcatcctgctcatgcttgatcagacgcttacgctcactagcagtagcagaatcatttttatcatgacgttctttctgcttttcatggcgtacacgatcttcatcgtattttttcttagtaagcttagttaaagtagtaagaattttaactggattcttagtttcaagactatgaaaatcaacagtaccatttgcaagatgaactgagcgtccaaaaatacgggccatgtcatgagcattgatcacatcttgccatggaaagatccaacgtggtacattcacaccttgttggacttctacagaaccatcaggatttaaaattccttccttattattagtagctggtgaatcattgccatcgtttaagattgcaggataaccatatttctttttccaatcagttccgctggccaaatggatattgccaaccttgagcttaccagtaaagaacttttgtaaagtcttgataggtcctgaaatgtgatcccagaaaccatcccaagctgatttaataccagaaatgatgttcttaaaccaaccagtgattgccttccaagggcgcttgaagaagttagtagtgtctttacccaatttactaaagaaactagtcattgagttccaagcgtgcttaacgttcttgccaatgtcgctaaagaatttaaccattccatgccaagctgatttcaaacccttggacatgcctttgcctaacttggtaaaccaactggtcatcgatctccaggctttcttaataccgttgccaatattggagaaccatttagtcatacctttccaagctgatttaagccctttagccatattctcgcctaagttcttaaaccacttagtcatgtctttccaagacttctggatattattaccaagtttactaaaccacttggttacacctttccaagcattcttgaaacccttaactaaaccgtcaacccacttatggaatttcttgttgtgcttataaagtgaattgatcgcaccagcaataggatttacgaagtaaagaccaacttctttccaatttttcttgaaccacttagcaacattagtaacggatttcttaaatcccttccacatgttgtgagccgaatatccaaggttttcaagagaccagaatttcttaggtggcttattgcgctgccagcctttagtgaaactattaacagctttaccgccccattgcccggcatatttaccaataattgcacccacaggagcaagcattggaccaacaacaggtatcatgctagttaaagcaccaccagccacagcaccgacagcaccaccaatatcttgactacgtttatcagcagagtgacggtccttaacagcattaatcacttcaggggttgcaactgcggcaccagctaaggcaccagttgctagacgcttacccatgctaaactttgtggaagcttgaacagccttagaaattgcttgaccaattttagtgcctaaagtagttgctttatcaataattgccttagagccttcaagtagtttagagccaatccacttactagctttaccaatacctgtagcaccttttttcaaaccagaaacaatatttttaccagcttgagaagcccaactagttagtttgctgtttttaagtactttaaagccatcttgcaaatgatctaatactcttttagttaagtcaccaaaatgagcaaatgatctttcagcacctgttaaatcatgaaaatcttttaagccagtaaaaccagctcttaaagcttttacatttttgtatgcattataacttccacgagctatgccaaggaagccaccacctagtttgctgattcctttagcagctgccatagcaataatagctttactaatccattgaatagcagttttattccttgctaagccatcagtagccaatttcagagtatgtaatgcatcccctgatttctttccatttccatggacaattcctaaagctttaccaatattttggatgattccagcaaaatatttccatacatctttgccaatagctacgccaatggatacgacatctttagtaattccaactaaatcggatttatgcttatctaaaaatccaatcatattggaaattgctttaccaagttgttgggcaccattcataactgctttagaagtcatgatattctttaaagcttgtaagccactagtctttgcattaaaaattggcttagtaaattgctgttccaatttttgacgagcgacctgcattgactttaatgcaccagcttgagttttgccaaaacctttgaaagcatcatcagaatatttgcttgcactagccatccattgctgaaattgcttttgtgttactttaccagtcttaagtaaagcaatcatcttagattgtgacatgccagcgcctttagctaatgcttgcataaatgtaggtgctgctttagtgattcgacttaagctggaataagttactttaccagttgaacctacacgctgaagactagctgatacacgttcaatctgatcaccagtaagtttagacgtatcacccacaccagctatagtcttagccatttgcatagcacctttagtaccaatcgttgaccaattgagcatgtgtgcttgcaaattagcaacattatcgccagtcatagcggtattagcttttaattcgcctaattgcttgtctaaagactgaatctgtctagtagacattcccatgcctttaaaccgaccattgattttagcaacagccaaattaaggttcatgccttcttcataagcattttttaagctagaaccaatgttgcttaaactattcgacaatgcattgcctaatgctgatcccataaatacttctttaaaagttctatgagttttttcagcttgactatctaaacctgtaagcttggtttttaatttgtcaaaaactgtcggattagctttatgcattgaagaatttaattcattcattgcactcttagttttagctaaagtcgtagcggtttgattaagcctaatttcttgacgtttataagcatcacttgacttaccagattcactagcaattctggccaattcttgagcttgaattttttgttgcttatttaaattttcaagtgaagatttatagccatttaatttagctttggctgattcatagccttttccttcagcttttagcctttcaacataagacttagttacagcttgagtttgctttaaagatttttgtgcttcagctaaaccagacttgtaatagttcaaggaagacttagctttttcttgttgtttagtaagagactcaagacgagtagtagcacgtaacgtttgcgcagcattcttttgaatttcttcagtagcattcttataagcctgcttgcctttttcagtagtttgatcagcttcagcctgaactttcttcaaatttctttgcttatcagctaaagcttcaatatatttgcgctgattttttacagtttcagttaagccggcatatttagctttagcagcttcagtttgtttaccagccgattttaaaaccgcttcttgagccttccatgcactagtagtactagatacagcttgtcttaattgccttaatgtttttacaggttgatcaccatttaatttaatatctgtaatcagtgaaccaactggtattcttcccgccattttttacctcctttctgttttgtctaaacttgctgcaaagtcccataggttcattggacgtttgtcctttggtcttgcactcattacttccacaagacggtagtaatcagtattttcataatcttctaaggacatatgagcattaacaatcatttgttgttcttgataatcaaagtcttccagcatttcctcataggcatgtactggatcaggatcattaagcattgtcgcttttggaatcgtctacttgtaagatttttccaattaagtcagtaacaaattcactgacatcacctggatcagaatcttcaatcttatctacttgtgcatctgataaatgaagaatcttctttaaaaacttttcttcttcatccaaaagattttcttgtgcagttaagacatcaagaattgattgatcatcatcgtctttgaccttgttaattgcaattgataattctgcaaaagtcttttgtgccttaagacatgcacgtacattttttacagttgtttcaacttcaaaagtagttaagtgcagctttttaccattgatttttactgacattgattgatattcctttcaaaaaagaaaagaacggcttttacaccgttcttgacaaagatattgatattaatttgccaccactacccaccctgctaattattagtgagtagttgatgatgaaggaatagtgtccttatgagtagcatcatcaggtcccttgtgagttggatcatcagcagttgaaccagttacagtacctgaaataatccaattaagcatcttgtcgaagtcgaatccatcttcatctgaatagaatttttcgtaaaccaaaccatctgatggacgtgcagcggcatttaaagtgaaggtatcgtgtaccaaagttgggttttcattatcagtacccatagttaaatcaccgccaggtttcaaattgccatatggcaacgcaaagtaaagatcaacgccaatgtttgagttatatgagtgagcaataacaccaccatatgccaatggggttgagtccttagccatgttcccaaagcctaacttgctgtccttttcaagacctacaattgcatcatagaaattgtgcggaatgtcgttagcaccaaaagtaccagtaatttgatatgcaccaaagtgttgttcagcttttgcgttagaaccatagacagcttgtgcagtacgacttaaaccagtgatgttagcttgagtagcacctttagatgattccaaatcaatcttaaatacaccatctttaccaatattagtggtcaaaccacctttggattcatcggtaactaacttaccgtccttgtcatatttgaaaacaagtaaatcatttaaaccttgaagttccatttttctctccttttaatttgaaagctaattgttggctcaccagaattagggtcatatgtgtgccctgtaaaactagctacgatttgccaaccattagctacgaaaaaagacatgagcgagtgttcaaattcgttcatgtttacttttgtgtttttactataaaaaacgtttatcgctaaacgttgtatctgttccgtgtattggttactacctgattctgtaaaatcaaaattcacttcactaacaagtatatccacagaatcacgtggagtacgctcactagtaccaactgcaaaactgtaggctttatgcaatttaggaagattagagctgtttagcaaatctactacctgttttgctacagtactcatttatctaaaatctctctgaatttttcagcattagcttttagtactgcttctgcagcttccttttctgcatgatctttaaaatgaaggttggatatttctttttgagacatatcacgtgtcccatcatttacaaaacgagcgaccattgcattatatttatcttcccagcctactgaagtatcaccagtattaccatcgttgacttcataacctgctttataagttatagcgtcacgcatgtgtttagacttacggccatgaccagctgaccgtgcatgtgcatagcttgtatgagacattggagtgttctttttaagcacttcagcgtaagtcttagccccttcaccagtgatagctgatttttgactagtagatagatcaacttttttagtgatcttatctagccaatcatttaggcctttatctaaatcaaccatcacggtctgtcacttttgtgagagttatgagatcgcctgcagttggattttgaaatggatcaagattgatgtcactcacttcatacaatttcccattgtattgagcatgagtaataccatcataatttctgcgatggtgaataacgacaataaaagattcatcgtgatgatgtccttgattttgaatcatttgagtagtagttaagccccatcgaccacataaagtagggctagttaatgctttaaattcattagtaggaagtccattatcatcttcactatcttctacagtaccaaaagtgatcctattactcagtcggtcccatgtctgtagttgtaccatcgtcattcaccacctttgtttcatcataggccccacggagttggcctataatctgcttagccgttgtacttgatacagcagatgtaggatgcaaaaaccaattagccgcaattgcattaactgctaacttatacagttcaaatactgattcagttttgtaaaaactttcatcagcatcttcaccaattgcgccttgaacataattttcagcacctttcaatgccgttttcatacgttcttcatcactagaatcaagcgcatcatcgtcaggtaagtaaccaagtgagcgtttaagcccatcatcaactgttaagtaagtggtcatcattgatcacctaatttctattagtgattagcagatccagcttgagtgccaccgttatcagatggaacttgaactgattgcataagcattggttgactctcaaccttgtcaaatgaaccagatacaattgcttcatcatcccaaatcttggtatcaaatctaagcaatgcacgaatagcagtttgattacgtctaaatgccttatcagcaatgttagaagtaagcaatgacatttgttgacgatcgtataaatgaataaattccttaaagttaccaaagtagaaggggtggctttggtacttaccactagcattagtgttgttaggtaaccaagtatcttcaacgacacgaacatttacatattgcatgccgtccatattgaaagtggtttgttgagtacgtgggtctacactcattgcacgtgtaccatctgacatacgcactttagctaatgctaagaaaccagatttattagttaataaagtagcgccaccccataaagccatatctaattgacctaaagcatcaataatatcatcgagcttagtaatagtagccttcttttgtgatttaggaagtaagccaatgatctttgaattataggtaacaacattcttacgtgcaatatgttggtttaaccatgattcaatatttgcatttgaatcattgattaaatcattaggcgcaaagaatacatcaccgtagtcgtggatgttgtaactaagttgcttaacagaactatagtcgccttccttaatatctttatcttgccatgcgtaagttgagttattagttgaatcatcaggaatatcatccaattgatccattggggtaatatttgaaaatggttcaatatttctagttccatgatcagtaccaacgttttcaatagttaccaaatcacgtaagtcatcatattgacgcatcaaagtattaatttgagtttgttggtcgtctgggatagtcaaaccagcgttaccatctgaagttgaacttgatgataagttttccatatacttcattggatgtttaagcatatccttgaaaccagaaataacatcctttgatttatcttcagtcttattttcaataggctttgatgctggtttattaaccttttgagcttctacagcatcatcataattttgtttagcaaaattacgagcttgaaccgctttgttataagcttcagctgcctttttcatatcttcagcagaaacggattcgggatctgcttcatagttcttttgcaaagctaccttcttattaaagagatcagtaactttattgcctgcttcaatccaggcattttgtaattcttgtaaattcatgtgttctcttctttctattgccacaataaaagagacaagtcttttttgacttgccccttatctgtatcttcttgtttattttcaatgggtttagagtcagcattggactttttatcatgaattaatgctttaatcttacgaattgcattgtcacttaaaacgggtactccgtaagcattcacaaccgctggtgcttgatcattctcaaacataatagaatcagcaaagcctttatctactgcttgtttagcattcatccaagtagtttcacacatcatacggtaaacttcttgcttatctaaacctgttcgcttgctataaagatcaacataagcttgatccatagaatctagcgattgcattgcactagcaaaatcatccacattgccttcaacaccaccgctaactctatgaatcatcatttgagcagttggcgacatttcaactttgtcagccgctagtgcaatccatgaagcagcagaacaagcttgaccaactacttgagctgttacattacctgggtacttctttaaagcggtatacatttctgagcctgcatcaatgtagccaccaggtgaattaatctctaatgtaatatcttgaccattagcattgctcaaagcctcatttaattgattagggctagtcacttcatatcctagaaatgaataaatatcacctaaattattgggtacgattattcccttgaccggtactgttgtcatcgtcttcacctccttcatttgctggaattatcggtttatcgggagttggcaaatcatcaggtaaataaccataatgttgcaaaacataccgtccttgattgcctgacaaaatacccttgcttgataaatcaccaatttcagatgcaaagttatcaccagttgcatcaatagctggtctaatgtcataagtaatttgactatttaatttattagacaattcaccttgaaccgcaccagcatagcgattaagagctttagcatattgcccaccaatttgagtaatattactttgctggtcgccttgaccattaaggtaagaatcaggcacgccatagacctttgcaatttgcttaccagtccaatctgcttgtgaaagtaacttagctacatcactttttacttcaagtggctggtaagtttccaaatcatctaagacaattggtccattatcagaactattaacctgacgcataaactcacgtgatctagctgattttttcttccaatcaagtaaaccaccgccttgaatacttaaaatcccaggtgcttccacagattgagagagagcatgtaatgttaaacgattacttgcattcttgatattcaattcattagctaacccagtaagcggagaaacaccagtcttaccaccgtttttggatacaagcctgatatgaataacatcgctttgcggtacattctcttttggctgaatatcaggctcatcaaaattgatgttatatgttagccctgagccatcttctaaaagcaatgtttggacctgagacggtcttaaaaactcccaatataaatcaacgccattaatatttctccacctgtaggcataagcatttccgtctagcagtaactgtgcaaacattccttgccagaaactaaacccattagtcaaattagaaggattatcaattaagttttgcactctatccttgttagcattgagtttaaccaaagctaaatcagctgataattgtgaaataagtgaaaatatatctgaattttttaaagctgtatctgcagaaacataattgctagcggataaatcatttttaaacaaagtaataaattcaggatcatttaagctataaccagttacattacttttgtttaaattaaaaacaggcattattaatcaccccctccctgtccatgtggaagtagatcaattaataagcccgtcaaaagtaaagcaattcctagacctgcgaagcctgctattttattccataaaaaaagagctataacaataaagccaaagcccaataaataaaggattacatctaagaatttccaaatatctttaaacagtgttttaattatcacccgtttcacctcctaatagaccagaatcaggattttcaaaccactttagcacctgctcttgtgtcattctttcaacttcatgtgacttatcattaatcaagccataattttcaaaattgtacatagcctgatacatggcatctatttcggcgtccacaacatcaattttcttggtagctttatccttatcaacttgaataccaattttatcttctttgattactgcattaagcaaagccatttcttcaattggatcatcaaaccgtgtaattttgccagttgcataagattcttgtaagaacttagttgggttagctaactcacttgtgcgttgcgctatgtcttgaattaaccaccctgtattggcatttaaactttctgtgatgttcttaacctgatagctgccaaaacggtcataaccgaaaaatacgacttctagcctatgtttttgaacaaaatcaagtatccaattgtagacttgttcaggattgatgatgcctttttcatggctagtgatggtgcagtaccctttcttttcaagttcacgataaggaagaccatcttgtttttcttttgcttcaatactccctgcagcttgccatggaataaatgaatgctgcatcatatgccatttgtgaacaccatcagcagtagtataaggaaatgcgaagccaacagctgtattatctgaaaacattgagtagtccaagcccatgtagactcttaagccgtcaatctcaaaactatcatcaacagcgttttcaacatctttaagatttaagtagcttgcggttgactgtttcaaccacagatttaagttcttgttctgaaatttgtggagcgtgttggtaagcatcccttgatcacgttgtttaatcagattttcagttctacgcttacgttctgaatgagataaaccaataagcggatttgatttttcccatgtttcaggcttgaaagtttcatcaaggttatcttgcgcccacaccagacagagagagttatcaccttcacggtcataatctttttccgtaacatgctgtaatgtaatttgttcctgatgaaatggactggtaggatcaggataagccgaactgatcttgataaattgatggtatggaattacttgtgcttgaccatctgtaatatctgtaattctgtcatatgtattcaacgcaccagtttcatcataaatagccaaaacgttgtgagttgaatcatatttatcagcttcataactgattttccataccttattgttagttctcttttcaatgatttggttagtttgtaaatcaagacctgattcttttgcgagggatgcaaaaggttcaatcttaattactgcttcaagcattttcttgatataaccaaacagctttgtagactgatcagatgtattagcagtaactaaaaagtctttgttggtgtaattcaaagtatcaatcaaaacagctttacacatctgaataccagctatttgtgtcttgccttgaccacgtcctactgaaatatgaatatcagtaaatcttttttcatcattttcgtctttccaaccgttaatcatagcaagaataaacttttgccaattcattaatggtagtggtttatgaaggtcaacatctggaacaattgacgcaaatttaagagtatttctaacttccttcatatcgtaatgatatggaaaatcaggttgaccttgacgctttaaatcttgaagatttctaaaacaagcaagcttagtaatataacctgcaatttgcttaccatccaaaacgtcaaaacagtatttaatggcatcgtcattatatttaagtctgatgtcattccaatcaattgattgataagcaccttccacatcatgagtttgagttagatcaattttcacttcttaaaccacttcctttgagtaaaataaaaagctaaatcacagatttttgtgatttagcctattaattattaacaaaacagccattttgttaataatgatgcaaatttttactgcatttaactagcaaatagcttttttataattttagaatgccgtctttttatataattagctacttctctaatctgattaattggattcaaaacatctaaatcctttcttacccattttccatgaccgtgcttaacgtaaatcatgcgaaaaactcctttaaacttgtaacagttgatttagcatcatcatttttaggtgtattcagttccatcatctgacttctggcttttgggcttaagcccagttctttacctatcgtgttcatctgctttagcgaatcagacataatctgataagctggatttttcttgtatccttgaaagttcttagctgccaccttcccatccacaggagagatgacggttttatagataggttgctgaataccatgttcttgaatatcgtcataagccatgcggtaggtgtcgtaggctgaacagtattgttgaagtaaatattcatcagctcgtaagattttgtcattcttatttagataagtggcaagctttggatacaggtatttgccgtaagttccaagccatttaggtgcttgattaggtacttttggctttgatagatcaactttgttcatgtttcagccccctttcaaaagctttcaaaattttgtttgtggcacaagcgaacggcactgatgcggctccctagcgcccaaaacgagggcggggggcaaaaataatcagtgccatgtgtaatcataagtgccaaaataaaaaccgcttagaaacgattttatgagcttgtatggtgtcgttcgttagctattttctgtgataatttagcaatcaatttaacatcagttaccggtggattatttgtcggtttaccatgtaatcctgtgccatagtacttttcttcaaatctagttttccagtagtggcattcctgacagcatgtgacaagattttgtaaatctttcatgtgatcagggaatttctctactggcaaaacgtgatctattacattaccctctttaactttacctagtgctttacagtactgacataggctgtagtcacgtttaagaactataagccgcatatctttccattgtttagaatgataaaactcattctgctctgctttaatcggattgcgattgcgaactattttgttgtaataacgttgtcttgctgaattgttatatctatggaatcgataaaagttattacgcttttgtagttctgtttcatgtgcaatatgttttctacagtaatggtttggaacataggcaaactcgtgacagcctggatatctgcaacgtctaattcgtggcatcaactcaccccttttggcaaaaaaagccgacctaagtcgactcatgtttgcacgctcgctatgtattcataaataatatgcggtaatgtttgattataggtcatcgcatgctatggaacagcatcaattgaattatgacagttaataaacacggctgttcctaaacatagtcacggaatcgaaccgtgaccatgcgaaaaaaaaaaatctaagattgtttgtcgaatttcattcacttttcgacaatatcaattatgcactaatttccaccgatcgatctccgatgaaagtccgcacagtttccgacaaaagtccgattcatgcatacacacgaagatcaacaagattatcatcatccacatcacattgctgttgatagtagtcatatgcatcagcaaattcaagcagtgaatcaggcttgatacggttatagtactgtgacttttcataaggcaacatcctaataatttgttcttgatcatagcaataaacatagttatctattaatactgtcttatgtaattctgaacaactatagatacttttatatatagcttttattacttgttcaatagataaagcactaactatagatgtttcagcatagttgtgacccgtactatggcttggtgcccatgatagtttaggacttgataaatctattaaatcatgtccgcatcttcgtaataatctaggcaattgtttagatagaaatcgatcaacattgttagcagtagcagaataatttacttcagcaaataaattcaaaataaccaactccatataatagatatataacaattcgtaatatatctattatacttcataactaatagctatcgatataccgtttaattgctttagttgcaatcattgacattggttcattcagtctatcggcataatcttttaattcttcataagtatctgcgtcaattgttacttccataatattcacctcttctatttatatccgtagccaactaaaccattctctacaatctttaatgcatcattagtatttcgtgcaattccatgaataacattgaatttcattagcattttatgaaaagctatttgatcaggacgcggtttgccagtagcatttttcacttcaatataaaaagcttgatgatcccaatcacgccagccgtgtaagtcaggatagccagacggcaagcctgtagtaaagaatctgccatcaggtgttctaatcttaccgacgttagcacgaaaaatatgacaatgatgttgcgagacaactaattcaattttcttttgtatgctatgttcactttccatcaaacttacctctagtattaaaaattgcgtctgattcatttttctcatgcataattattttcatgtcatccatagttgcatgctttttcatcagaattaattgtgctggagttaatgaataaaaatcccccataaagtcatcaccccaaatgccttttcgtttgactggaaagaaatattcattagcaactgcatcataaattaatgaatcaggataaatctttcgcccatttttgtcatgtgaaataggcttatttaacatagttactgtcctccaaatcatgaatacgacgtgcaagaattaaaacagattcccaaacaaaattatcttgggcattagttctgtctttgattgctattgttaaatcttcattggctctaacttcttttaataaagagtcaaacaaattattacttttatgaatttctttcataagatcgttgttagacttcatggttttataatctgaaaacaaattcagtacacttatcgtagggtaaagaattgcaaataatacaagcagtgcagttttcattacttgtcatccctaactagcattggcttactatccttgttttcttcaggaataagttcctgttgatcagcttccaagcttacttgaactccgttgccatcaaaagcaatgtctttaagcttatttaagttaatcttatgagtaagcaagtctgcatctaattgcaaaaccactttgttaccattaactttaaagttatttgttgttgcttgaaatttaattgtttttcctgtcattttcatgttccttttgtgtttcttttaaaaattctttttccgcttcatttgtcaaaaatttaagcgttagcatagtagcatttaagtttaaataaagctttctggtattaactttatgtcctttgttccaatgctgttgttgtcttttaacatcatttaattcagattcaacagttttaattccttcattaaataactctttatcaatcattttcatgctcctttttaggaattaaagtcatatcaacatcattaggattaaatttaatttctaaaattctcaaatctgtaacatctctatatattgattgaccagctgatcttctagcaagttgagcatctaggaagaacccaccagggtatctattagatctcattgcttcccatcgtccgctatccttattgaaatattcaagtttataaatcttattcatccttgtgctcccccagatatttcaaacctagaattgcataacctgcagtgtctagttctgaaatatcgcctttaaatttaataatcttaccgtgcattttagtttttctccgttaatttacgaccacacataggacaatagttaatcttgctactctttgatacataagtaacttcgacatcacaagataaatttaattcatttccattaatataaacatttccattttcatatctatcaatacctgtgtacccatcttcatatgtatcttcaattgaaataattgatttttcattattacagtaatcgcacataattattcctccgttaatcagtaatcacaatgcatgcattcactttttcagcgtggttataactattctttaagtccctagccgcttctttaggtgagtcaaataatccttcccaagtttttgcttcattgtcactactactgtgtatagttacaacaatacaacgatcttgttcataataactatcataaaaagtcgagattctaaacagattatattcatctggatcattatcccaacacattaaaatatcaccatacttgtaatcctcattagttttcttcgttcttttatcaattactttcattgccatactcctttatgtactcctgaggcaacataccatattcattaaagaactcaccacatagagcaagatctgatcttacacagtaatctgtagccattatgtgtctagcttcttcaagacccaatttaatatcacgtccgttttcatctttcattttcatgctcctttaatcaatagttatcgttagcaaactatatctagcaatgtccatatctccgcaataagggcaatgtttaatatcatcaatttcagcaataataaattctctgccgcaatgttcacaatggtattcagctaaattatgattgttcattttgatgttctttctttaaattgcgtccacaccagggacaattacctataaagattttgtcagtttcctgagaatagcactcaggatcaggatgagaaataattaaagctggatgatttttacaatcgatgtaagtaaacattattccgtcttcaccattcaccttattaatctcatctggatcaacatagtcatctctgtagtagtcgcgtcctagctttgtctttgggttgatttcacaatatttacacaaatttaaatattctttcctctcaagtgacttccacactgatgaagtgtagtgaattaactgataccgtcacaaaaaatatcagcggtgagtttttgtatagcattgctaattggtaaataccgatatgacatcttttgccaatttgtcacctatttttcttagcactcaatatagtagactgctaatcgtggtgggttggctaaaaatgtgaccagtttgtggtgagtttgtggtgggtcttacgcctacagcctgtagtgttgtggttagtgttactacttttttctttaaaaagtaaattataaaaaagaaaataaatataataatataggcttttaaactaaccacactaaccgaaacacgtcacacccctacagcccaaacggtttgagctaccacatatactcaccacaaccaaccacaactaaccgcaactaatcacagccattaattccaatcaaaatgaagtggttctttctttaattggatgcctacatagcgagttccatttctttctttggttttaggcaatttcttagccatttctctaccaaatttagtcatagacatcaaatgttcattagattctctagcccaatcacgatatgcattgtataaaggtctacccatgatagtgtaattgctaccagctttacagcattcatcaagaaatgcttcaagtggatccatgttttcacggtattgcttggatgcatcttgaacaacttcagggtctttcaagccttctacttgccacatgattgcgccttgaacgatccaatttaagattccagtccattcagcttttaacttgttttccaaattcttatcaactttgttagctggaatttgtacattgaatggaacaaccttaattcttctccaaataccttcatcagttcctctaatgaatggcaagtggttagtagccatccaaatcttgaatttaggatcatattcaaattcttgaccatataaaaatctagctaggattctatctccaccagttaattgcttaactaacgattcatctaaacgtgaaccttcattagcttcagaactggtaactaaacgtgtattttcaagtcgtgcaatatcactattagcacttccgcttgaattgtggacgatgattgactcaactgacatctgctttgcataactaccaagaatatttctgatagtattgataaatacagatttaccgtttctaccagtaccaagtagcaagaaaaatacttgttcagcagtcgatcctgtaattgagtagccaacagctttttggatataatgaatcaatttctcatcatgattgaaaatttgttctaggaagtctttccacataggacaatcaatattgtctgaatattctgatgcggtttgttcactaaacatctttttaatatcatgatctttcaattcaccgttagttaaatcaacataaccagattcagtgtttagaagcatgttgtcatgatcaaatacaccgtgatcaatagttacgtacttcttaaactcctcaatcatgtgtatttttgccatatgggaacgtgattctttaatgaacttattccattctttcattgctttatctttatcctgctgagtagcaaagctgaaatcaggattttcagttttaatcaaattaacaactttttcagctgctaactcaatatgccgtccattatctaattcccaatatgagccattatagaaataccaagttttatcagctgccatatatctgaatacatcaccgaactgatcatttaatctaagtcctcttcctgtatcatcccatgaacgagcaacagcccgttttttaggtttgttccagttaaagactagatctggctctttcccatcttgctcaggattataaatattaacggcttcactgattgctttatttaaaagggatattccataagtagtagcaccacgtttttcatcatatttatctctcattaaactggaattacgaaaaatcgtatccattttgtggaagtctctaccagtccaaaatgcaaggtcattagcaaatgccatatctgcttcagagtgagaattatagaattgttcccagccgcccttcatgaacatggtaaagcgagtaccagtcttagatttttctgcacgttggatgatgtcaggaatagataaatctagcgctgtaatttcaggttcttcaatcttatccggcactgatttatcagcaccaaataagaaattataaagagcttgcatcttttcttttgaaagagtgacaatcttaggaataccaatactgttcccagttagtgcaaagaaacgcccttgttggtacatctcataattgcctttacgtctgcgattgcctggaatctctcccttaaaaatacagtgaatacctgtaccagattggctgacttccatataagtttcatcagtcattaaacggaatttgtttatcagattgctaacagaactatcaccttgatgccaatctgctaaatcatctgaaatatgatcaatatcaagccctacatatccgttagtaaaatagaatgccaagccatcagcacgttcaatttcatctaatgcttttagtgctgtattaaaatctgaccatgtactaggatcattagatttaccagctctaccgttataaggatcaataggaatcttggtatttttattccgctcctttacccatttaagttgaaacaatccccattgctttaaacttcgcaattcttgagggatgttttcataggtaaattttcccatttacttcactccttagaatggaatatcattttcggataattcatctgttgaacctgtattacctttaaatggatcttctacagtttcttgctttttagcagcttgtggtgggaacttagtcttttgccatgaattagtgaaggtactattttgtttgcgagtttcacctttgtaagtattctcacctactgaaatgtagattctaatgaattttccttcacatgctttcatcaaatcttcttttgacttgatgtatttatcaatttgagcttgagttaaaccaattgcatctgcaatatttgccaaatctgctggatcatatgagcctgaatcttgaccggtttctttatccttagcagtccaaacatttgcaaagaagtggcgaccatgtgtttttgcattagtattagctaatgcagaaactttgtctaagtctttacgaactagaaaatcaaattgcatattttcatgaccgctagggcttgcatcaccatggacgcttacaatttgcatttcataagttccctttggaaatagttcacttctgttgtttgtcttttcgtttaaattaataaaacccataattaaataaatcctttccttttagccatgtgccaagcccaaccattcttataatgttttgcctttgcatacatggttaattctttaaaactggttagttcactaacctttttctttgctattagatcaatatggaatttttctgctttaatagctcttaattcttgatctttcttttgtttaatttttctaatttcaattgaaaaatcatgaccgcagatagggcatttcacacattctgctttaataactgcaaaacaatcaggacatgttttaatctgtaatccttcagtactaccgctatctttgcgtggatgtttctcacgatcttccaaagtccacttgtaatcagtatcaggcaaaccaaacctttcaaagttaccaacttgatcaataatgattgcgtgtttgttaggttgatacctcatggctctcattgattgctgtaagtaaattactaggctttgtgttggtcttaatagaactacacatgaacagtcaggaacattaaagccttcacttactagatcaacattgcataatattttgatcttgccttctttgaaatcaaccattatcttgtcacgtttactttcaggagttttagcatctgcatgaactgcatttatacctgcatccctaaaagactgtgctacttccttactaaagctggtagaatggcaatagataatagttttacggtctttagcaaacttgagccatgattttacaatgtcaccatgtataattgacttagtgtaattgtttaaagatttttttgtataatctcctgtcgatccactttttaacgttgatttatcacctaactggtaaccatagactgtaaatggtgccagttttttattttcaattaaccatttagcagttgggcctaataccatagctgaataaatatctttaaatcctttaccagataaacgccatggtgaaccggtaaaaccaagccttggaacatcagaataataattaaatattttctgatatgttttagctcttgagtgttgtgattcatcaacaatgattaaatctggtttggctaaaatatttaatctatttgctactttacctaccgtgagaatggtgcaatggtttaaatcgacaccctgctgtttaaaagaatctttgatctgctttactagttcttggcgatggacaaagaataatacatggccacctttttttactgttaatttagcaatttcactgattactactgacttacctgatcctggagggctaacaattaaaacgccttgatttccagctgctagagcatttctagccttatcaattaaatcttgctgataatcaaataattgaaacatttaatcatcttgcttattaattttctgcatcatcttgataaaatcactggcatttctggtatgatcattttcttgatcaatctctcgttgaatatctctaacgagaccagataatacaatgccatgaccatgatgcattcgaatctggttgccatcatcgtttaaaccgacgataatgaaatgtttagttctgccgttaagaatatccatgcaagttgcacttactttgtcttccatttctttatccaactttaacttttcatttacattttcactaaacattattttttctccttaactttatctactgctttgtctaaatctgatttttgaaacttaaataaatcttcgactttgcagcctctacgctggtcaagcctattttttgcatatgtcccttcatcgccatcaagaattacaccgcgagttccatcatcaggtttcttaatcattcgtcctactacatcggataggcccattaaaacattccgaactgaatctcttagttccggcccatattgattgaattgctggccggaagctgtagttattggatgctctgtttcccatgctgtgatatatacgtttagtggcatgtcataaatccattcgataaatctcaagaagtaattagtccattgagaatagtgttgtaattcattgctaattccattttttgattctcggcctttttcttgaaaccaaattttttcgaaattggaaatatcatctaaaactaaattatcgtatttagttggatcgaatgactctaaccatttgtttagatcttcaattggtttcttagcgtcaatttgccatgccccagctaaatgacctgctaaaactttaaaggacttatcaaaacctaatacataagttttacctggaatgaatttagcagtagatgttttgccaattccttgttttccataaataagcacacgccagtttttcaacttatccaatgtttgaatatttatttcaggcattcattgatacctctttttctaacttttgccatttatatccacctgcataatttctttttcctcttaccacagcggagatatttccttgactaattccagtaatttttgaagcttggtttgcacttgaataggctgcaattctgtggctgtctgaagataactgaataataggagtactaacagcttgaataaatttttgagttctatgaccgtaatttaagttgtgagaatgtgaacaccattctaaatttgaaacatgattatcatctcttatttcatttaaatgatttatttcttggtatccatgaggattatttaaaaatgcttgagcaactaatctgtgaactttgaatatttttcctttaccatttttagaaagtctgaccattaaatagcctttttcgttaggtacttgcttcatcatctttccatagatggttatgtgagaattgccatgcttaacttttctagtcagactacgaatccttccaaaatttgaaacttcgtaaagtgattcaaagtgtttaattggcttccaaacttcttctttccaactaaatgctggcattattcttcacctgcgtcatgaatcaaatttttaataccctgaagctggttaagcacattgttagtaattgctttttcatatgctttaatcattacttgcttaaacatagcccactcattagtatttttgattgcttgaaaggcttgtcttgcttcagacgaatcaaactctgcattttcccatctagcagcaaactttaattgtgcttgttccttgatactatcttctaaccagtctttatcaatcatcgttatctacctctctatccaatccttcattttttactttaatgattgcttcttcgtaaattgatcgcactacattagcgactacttcacttggtgcagcagtaaatttacctggcaattctggcttatttttattaagccaccgcattgcacctgaataagttttgccattctttttagattgatagatcaagtaaattacccaatcatctgcatcatttttcattttctcaatccaattctgaaagtctttcagatctttattcatcttgcatgtcctttccgtcatagtagtctaggactaattgcttaatttcgtgattgtcagtgccattttcaaacatccacgcatacatctctgtggttgagtcaaagcccatgtcttctgcagctacctcaggttcttggataatggcccaaataatgaaatcacgacaagtactaaatttctcatcctgaccaatcgtgcagcgttcatcaccgtaataacaaacgattacatcttgacccttgagttcttcatccgctctttgattacggataaattgacgttcttttcttaactctttttctgattttactttcatgtgttatacttcctttgattgttttacttgagaactaccacatcatggctggtagttctctttttgtttaagtcataaattgtagttactaaatcggtagcagcccacaatttatctttagtttctttactaagctccatttcttgctcctttaaatccattgaaaaattgcatcccaaaagccataggctagaaggcttgaggctagaagtactacaaagataaaaatgtttaaaaacttgtcatcattacttttatgaattggcttattaaattcacgataataatttttgttttccatcatagttcatgctctttcataaaatctgtaagcatttctctactgtaaagtagttgcccgtctacactggtagggatgagttcatcgctatggttaagaacccaatttctaaatgtcgatttacttacgccacaaaagttagcagcttcagttttattaaaatattgctgttgaatcgctctagcgatcactctttctggaattgagatttgcatggtgatcacctacatttccaataaatccaattgctctacggttggatgaatatcgtgttcagcaagcttgtcataaatgaactttcttcctttttgtgtccacttaagattgttgcgaataccttgtctgttgttcttcttataagcaaagggttcgtattgtgtgtaaccttcgccacaatatttctggtaaagtacccaatgaccgccttgcttataaataatgtgatgagctgcaagccacttattcaatttagaagctgaccagccaaaatcttttgcaatttccgtggttgtcattaatccaggatttctcatttgagaatcgtagtaatcaacctttggcttttgcttttctaactgaatctgttgattagcagctaactgtaatgctccacttagtgtggttggaacattccattctctatgtagcttgttcaagatttcttgtggtgcagtttcaatagttttcttcattgaattaaacaagctaacatattgtgcggtaaattggttgcctttcttgccggtcatcttattggccacgaactcacagccctgtttagtgagcagataattaggtaatacttttccttgcttactggtataagtgcttggaataaagaactgatgagggtccaattttggactgtcctctaaatctttggtatataaacgaatatcacgcattaaatgcttgtgatctttactgatcatttcagctacatctctgctatctaaaacatcctgtccttcaaaatttaaaagttccatttcactgctcctttcttgctagattaaataagtattgggtagttacacctaagtaatccgcaacatcttgcaacgcatcagctcgtggcatgcttttatcccacttgctgatcattccatttgatagctgtaaatcatgttcgatttgataaatcgacttatggttctggccagccaccttttttactgctgtataaagtgacatttttatgctcctttctaaataaaatattttctaagaaaatttactattgttattgatttattaccgaatatattctattattaaagcgtaagaaataagcgtgatactaggtatctcggtattcaataaatagtattttttttctgtgcctctctcaagcacatttatagaatatcaccgagaatattcagtgtcaactaaaaaacgcaaaatattttcggaggataactatgtctgctctttatggcaatataaaacggcttgctgacgcgcacaagatcagtcttgccgaactagaaagaaatttaaaattttctaatggaataatttctacatggaaaaaaggtaacccttctattgataaagtagaaaaagttgctaattattttgacgtttctactgattacttgcttggcagatcttctaatcccactgacaatgattcaggcatttcatggttagatttagacatgccgtacggtggtaaaattcctgacgacttaaaaggaatgtaccgtgccctagctgagcaatatgtaaaagaccatcctgatagtcttaagaaggattaataatgaacgaagtaataacttggttaatgaattactgcatggagcatggtattggcgtggtttatcaaaagaaattgccagaaaccgctccaagcgacagctggcataatcctaaactaataatttttaatgcgaactactataaagttaacgagcggcctttcatgctggcacatgaaatcggtcatgttgtggaagaagttcccgagtattacaaacttgcttatctaggaatggaaaaaggagagttctcagctaatcgttttgcgattaatctgctctccctttactgcatggaaaacgacatttggtatgaaacttactatgattttgctcaagcgttcggcatccctaaagacaaatattacgtacttgagtttgtgtttgaatcaatgaaggagttttgattatgagattaaatcatgattgtgtaagagatgtgatgctatttattgaggaagaacaagaattaggaatggcactccatttacctgattttttaaatcaaaaaaagccggccaaaagccgacttgataaatacgatgctgaaactattaaatatagtttaatgaagttagatgaaacgaattatttaaatgataattgcgtcattactcaatatcaattgattgaatttgatgtcacctcaatcacatggaatggccataagtttttagataccataagagatcctaaaatttggaaaacaacaaaaaatgtagcatcccatttagagagtatctctattacactactttcaaatattgcaagtaatgtcttggaaagctacattcaaaaatttattccaaaagtctaaattcactaccgtcgatgaatatatagatattggtaggcttgtgacccaatcttttagtataaaaatgcattaattctggcgagacataatctattgattgtaaatcttcaccagaaatatgcattgtacttaagaatttattctgaccgtcttcttttgtgaaataaataatacttttcataattgtcacctcattgacattatacctaatcgtccacagtgacgttaaacctgaatagttttcggaggatatagaattttgaataagaagattttatcattattagcagtcggtgcaactctaggtggagttttatcagctcctacctcaacagtttttgcatcccgtaccaagtcagcaaaagttgcaagaaagcacgcgcgtgctaagaaaagagctactcataagaagtttaaagttccttacaaagctttagttggtgctcaaccaactgaagttgtaattactaagagagtcaaaatgtttgaatacaatcctcgactaaaaagaatttacaaacaaaatcttagttcaggcagagttgtaactgctactcaagcaaacaacaatgcttggattattactcacttaggcgctggtgaagtcaacaaaggatctatttgtgtagtcaaaggcaatggctggtttatgactaaagctgaacaagatagacgtttagaaaatgcacgtcgtagattcaatagttcacttgaaaatcaagttggttctcaagaatataacgctatgcgaaatgaattaaatagttatagaaacaatattaagaactgggtagaacattactaatcctaaaaaaacacccgcttaccgctggcacggtaaacgggcagacataaatgtatccggaaaatacaaaatattttgtagacgaatgccgactggcatcggcgttttcgtctaccctattttagcaaaatggaggtaaaaattaaaatgccaaaaagaaaaaatacttcaattaaagagtatgcattaaaatctggtaaaaaacggtttatgttccagatctatttaggatataacagcaatggaaaacctattattactagaagacgtggttttaaatcttatgctgaagctgaagcagcatataacaaaatgtctcagatcaaggcagatgattttgttaaacaaaaacaaattaaagttaatgaattgtttgaactatggtttaaaacttacaaagaaaccgtcaagcctcaaagtgctagtagagtatttgttaattacaagcaccatattaatccctattttggcaataattacatggatagcatcttagtgaaggatctacagaagtgggcagataaattagcaactgaattagttaactatcgtcctgtaatatcaattatgagatcactttatgagtatggtatgcgtttaggctacatatcagataactcaattagtcgaattattacaccaaagaaaaccactcgcaagcgtcgcaatgtggacgataatgtttattctaaagaagagcttgatacatttcttgatgttgctaaacaagtaaatcagtgtgtttatacatactttaaattactagcttctacagggatgagaaaaggtgaagctttggcacttacctggaatgacatcgacttggtcaacaatacaatctctgttaacaagactttaacaagtgttgaccacaaattaatcctttcttctccaaagacaaagaactcaaagcgttctattcccctctcagccaatttaaagcaagtactgctagattatcgcaagagtgagaaaatcgtctcagtcaagctatttcataggttaaacggcaactattggtcattaagtcagccaggagattggcttagagatgtctatgctaaagatcatgcattaaatgttaaatacgctaaagaacataagctagatgattcttatgttagagctaaggacttacgtcacatatctattcatggctttaggcatacctttgccactctcttaattgaaaacaccaatgttaaacctaaaacagttcaaatgttgcttggtcatgcaaatataaaaatgactcttgatatttacacccacattaataataagaataaagaagacgcaattaactctatttcacaactaaatatttagaataaaaaaagcacctttttagccattttttagccaaaaggtgttttttagtaccctatgtgttgatatatcagtatttatgcttaattgagtgaaacaatactaacttcattatttgtttttcctttttctaggtataaaaaaagacaccatatcaaaggtgtcctttaactagttattgctgttgtcgttgttatttacaacttgacgacccttgtaataaccctttggtgaaacacggtggcttaagcggtattcaccagtagttgcatcatagtgcattgctggaacattcaacttaatgtgaccacgacgtgaacgtttcttttgtttagaagtatgtcttgcaggaactgccatttaatttgatctcctttattgtagtcttaagcttcagggtcatataaccccgaatcactcacgtagttcaatcatactattcaattgctaataaatcaagatttattctattttcttctcttttttattgaagaaagtgaccttgtgatccgttttttccttagtatctcgtccaaagaaccaagcaataatcatcccgataatcaccattaccactaacacaacaattagtggtaacctcaccttaaaaaagccaaaattaattgcgacaggtgatgtatttaaaacaacaaaaattactgcaattaaagccacaactgatccaataattaaatttctttgtttttccatctttttttactttctagaagcaaactttaaggaaatctcatcaccaatcgatggaaatagattatacaatttagccgctacagctaaactaagtggtaaatttaattcacgtttatcactgccaaagaagtgaactacttgccaagcaacatcatctggatccaacataaattcttgaacatttttgacataatttccagtcttatctgctacattaaggaaattagtataaactggtcctgggtttacagtcattaccttgacaccaaatggctttaattctagccgtaagacatttgaaaattgaattacggcagccttagatgcactgtaagcggctgacttggtagttggtaccttgccagcaattgagccaaaattaataatttgaccagtcttttgttccatcatgaccctacctactaaacgagtaaagtacatcaaacctaaaacattaacttggaacatattggtaacgtcttgcattttttggtccataaattcttcgaatttaccaaaaccagcacaattaactaaaaagtcaatgtgttttacttgtttagtaattgcattaaaggtttgttcaatttcttccggcttacccatatctgttggaaaaacatatgcttcagcaccagatagttctttagcttctgctgcaatttcatctaattggttctttcttctagcaattaaaattacagtagcaccacgaccagcactttcaagggcaatggaacgtccaatcccacttgaagcacctgtaattacaacaactttatttcttaatgagtctttcatttttctgagcctttcattggaatattaatctgatcaaaatcattaactaatactgtattagaaaatacttttttagcctgtttttcgagttttttcgctttagcacccatataacgagcagaaatatgatttagacataataatttaacattatctttccgagcaattttggctgcttcaaccgaagtagaatgataataatcatgcgccaatttttgttcatcccctgcaaaagttgattcatggactaaaacatctgcatctttagccaaacgagcaatacttggcgtggaacgtgtgtcatagatgaccgtcacaattcttcccgatttagtaggtcctaagaaatttttaccatccaaaacagtaccatcagctaaagttactttttcgccattttttaatttccccaaaagtggcccattaggaacattatactgtgctaacttgtcaattaataattcgcctggatgtgaagcctccactactctaaaaccaaaactaggtatccggtggtctagttgctccgtatacactcgaaagcccttatcctcacagattaaccctgatttagctaattcaacaaaccttataggatatgaaattttagtccgagataccttaagagctgttctaacaaattcttcaataccactgggaccataaatagtaataggaccaacatcaccttgaaaagaacgagttgacaataaccctggtaacccaaaaatgtgatcaccgtgattatgtgatataaaaattttggtaacttttcgtaatttaatatttgttcttaaaatttgatgctgagttgcttcacctacgtcaaaaagccagatttcattcaattcatccagcaacttaagtgcaacactagaaacattgcgttgctttgaaggttgcccagcaccagtacctaaaaattgtaattccatgaaaatcctattctaatctaaaattttgaatgcttaacaattgttttggtaactaatgcactatagtattttgagccctctaaattagggtgagtatgatcaccgtagaaccagtcaggatgattcttcgagtatgaataccaatcaattattataagattatgataccgttttgcaccttgctttagcaaattattcactgaattttgccaatctctagttggaacgtgaacattgatccagaaaacttttctcttaggcccagcctgatgcattattcgatcaagatcttccattgagaaaggtccattagttcctaaccctattaagatattatctgctaaaactccttgactttgataactatctaataagccaaaagcaatattcaattgtcttgaaacagcagcatcaattaacgctttaggcattaattgttttaaatcgttgctcgaaccggccattaccgagtcgccaatcgcagttacttgaacatgttgagccaattgcaaatctaactgggaaataccatatttaacaaaagatttgttaataggatgctttttagtttgaagctcagcttcacgaataattttagattttttttcttttttctttttttctttttttaacttttcaattaatttagcattatcctttttttgttttttagaattctgattaattcgctgtgctaattggcttttattaaagtcttctgcttttactcctggtgaaatagcaatagctgctgatcctaagattaaaatcaaagctgctaaggctgcttgacctttcttaaagtaatcttttgtttcaaaattaaaaattcgagcaaaatattgcttcgttttatcccaggtaatcctacccattggtctttcaatcaaacgataagtaatttctgtaatcactaaaattaaaatcacttcaataaggtgatacagcattggattatcaccaatatttaccttatcttcaaaaaagatcattactggaaattgatacagatagatgccatagcttcgtgagccaatccaatcaaataacctattagttaggatttgattccaatgactaccaggatgagcaattacagctactaaaatacatacatctaaagtaaataacaacatcccgccagagtaagtaaaggcttgttgtggattcatccacttagagaagaacattgctaacattaaaataaatgaagcaaggcccaccaagtccaatatccaacttacttttcgttcaacttgctgatttaaaccttctatcggccaaacaactgctaatgctgctcctaatcctaaagaaaagaaacgagtatcagttccgtaataaattcgattaatatcagcctttaaaaagtataagattgccatttctaatgcagaaacagctgatagaccaactaaaatccagaaaatattttttttctttttaaccaatttaactagtaaataaatgacaattggccaaacaatataaaattggccttcaattgacatcgtccataaattagtaaatggtgattcattagctgcaaaacgctcaaaatagctttgaccattatgaatttgccaaaaattaaatacatttaatagatttgcaagtacaacctgatttaatttagccagtaaatttcgttgaaagataaagatataggctgcacttaaccataaaacagtaattaattgtggatataacttttttattcgactcaaataaaaatgacgattattatatgatcctgttttatcatatgaattaagcatatgatctgtcaccaaatatcctgagagcacgaaaaaaatcggcactcccagatatcctcccataaaggaattaggatccaaatgataaagaattactccgataactgctaaggctctaaggccagaataccccgtaataaacctattttttttcataccctatctctactcttattgtacgaattcaaagacaaacttgccaatagccacatcatcaccattaacagctcctttttcacgtagtgcgtcatcaacacctaaacgcttaagctttcttgctaaacgcataataccgtcttggtgatccaagttggtcatttgaactaatctttctaattgttcacccttaacgataaattcatgttcgccaacttgctcaactgtaaattcattcttttgtggtgcctgatacttatattctttaatcttttgtgctagcttaggttgttcttcagcctgttcttgttcaacttcagttactaagttggcagtatctgacatcaacttatctacgcctttatgagttacacttgagatctcataaataggttcattatttccttctgcttttaatgcttttttaaactcagctagtttttcctcagcaccaggaatatccatttgtgaagctacaatcaattctcgcttctttgataaatctgtttcgtaatttttgagttcttttttaatggtatggtaatcatcaattgcctcacgaccattattaggatccattgaaactagatgtagaattactttggttctttcaacgtgacgtaaaaattgaattcctaagcctacgccttgactagctccttcaattaatcctggcaaatccgccattgaaaagtcacgaccatctggcaagataaccattcccaaattaggagttaaagtcgtgaattgataagcagcaattttgggcttggccttagttgttactgataacagtgttgatttaccaactgacggaaaaccaactaagccgacatcagccaataattttaattctaagcgcaaaacgcgatcttcacctggttcaccattttcagcaatttctggtgcagtattaacactagttgcaaaatggatattaccgcgaccgccgcgaccgcctttagcaacgactagttcttggcccttttcagttaaatcaccaatcaattcattagtgtcataatcatatacagtagtaccaactggaacttttaaataaagatccttagctgcacggccatattgtgatttaatacgaccattttcaccactatccgccttaaacttacgccgatagcgaaaatccatcaaagttcttaagccgctgtcagcaacaaaaataatactgccgccacggccaccatcaccaccggctggaccgccattagggacgtatttttcatggcggaaagccaccatgccatcgccgccttttccggcttgtacttcgattttagtttgatcaacaaatgtaggcatgtatatctcttccttccgtcttaatctagcttttaatactataccacagaaatacgcatgatatcgcgttttctcggattacaatgttaattttaccgtttgtgcttgagtaagcgttaatcctgctctacgcaagtcatcaattgaagcttctttaattttcttcaatgaaccaaattcgcgcaataatttgttacgacttttaggaccaattcccttaatcgaatctaaacgactggacaaagcatttttagcatggcgtcttctatgaaaagtaatcgcaaagcggtgcacttcgtcttgaatgcgcgtcattaaataaaagccctctgatttgggattaaggggaatcagtttcaaaggaataccgttgatgggatcgccaaataataaatggtttgttctgtgcttatcatctttaaccatccccgcaactgggatattcaaatttaattcatttcgtaaaacatctaaacaagcatcgacctgaattttaccaccatccatcaaaatcaaatcaggcattcttttatgctcgcgcaacagtctaccatatcttcggcggacaacttccctcgtgttgcgtacttcgtcgccaccattctgatgttcaacctcaccttttagcttatatttacgataagctgttttttcgggttcaccatctttaaaaacgactaaagcagagactgggtcagcaccttgaatatgggagtgatcaaaactttcaataaagtgtccatatggtaagcctaaagcatcaaaaatttctttttgagcgcctttagtttttcgattacctagttctaataatctaaacttatcatctagctttaacttagcattatccttcgccatgtctagcaatgactttttctgccctcgttgcggtgttctaacaggtaccttcaagacctcagctaaagtagcattatcaaatccttcaggaatcagaatttctttgggcaaaaccctatttctttgctcataaaattgcacaataaaagaagtgaaagcatcttctggatctgtggcatctgtcaaaggaaacattctagtttctctacgcaataactttgcttgccgtaaaaagaagatttgaacagaaatccaagacttgtcaacgtaataattaaaaatatcacgctgcgtattatcattggaaataattttttgtttttcaaccgtttcttcaatatatttcaattggtcgcgaatttcggctgctcgttcaaattcaagattgctagctgcttgagccattttttcggtcaaactctgcttaacactagcaatatctccattcaaaaagctcttgatctttttaatttgctcttcgtattctttttgtggcacttttttaaagcatgcacctaagcactgccccatatgatagtaaagacaaggtctgccttgataaccatgacagcgccttagtggaaaaactttttgaataaacttcaaagtggcctgggcagcatatacattaggatagggaccaaaatagtagccaccatccttatgaacgatactagttaaccgagtttgcagatcatgttcacgcgtgatttctatgtaaggatatcccgtaccctgctttaattgaacattataataaggttgatacttttttattaatgtaatttcaagtaaaaaagcttccttatcagttgatacagtaatgatgtcataatctcgaatttcacgaactaattcagcacgacgtccaacctgtttactcttaaaatatgagcgaacccgattttttaaatttttagatttaccaacatatataaccgtaccgttaatatctttcatcaaataacagccgggtttttctggtaaaagttttagtttattctcaattaattgtgttgccattatctcatctcactgaaaaaatttgcatttaatagtttaacacagactgtttaagaagatcttaactttgcttatagaaatagctattcggtacaaaagttgatatattaaaagaaataaaatttgaggagaacttttgatgactaatctagtttttgacttaattaaccaatttggctacctagccatcagtttgctaattgcaatcgaaaacatctttccccctattccatccgaagtaattctatcgttcgctggctttgcaacccatcattctcaaatgaatgtcttcggtgtaattattgcttcaacaatcggcgcggtagttggtgcactagttttatattggattggcactttacttaatccagatcgattagaaaagttgttcgatcataagttattcaaactacttggctttaaaaagggtgatgtacaaaaggctatcagatggtttgataaatacggtaccggtgcaatcttctatggtcgctgcatccctgtagttcgtagcttaatttcaattccagctggaatagccaaagttaaattacctaagttccttatttacactagcttgggcagcttactctggaatgctattctagttggtcttggttcctatatgggtgaaaattgggaacaaattgtgttaatttttgaagaatactcattaattattggaggacttattctaattgctttaatatatttctcctgtaaatggtataagcaaaaaattaaagctgattaattcaaacgctctataaaaaatatagagcgttttcttcttttaaaaattaaaaatatcatgtaaaattaatctaatctataataagggaagtttgcgaatgaattttaatatttttaggaaacaaaatgttgagaactatctcggtaaagacattaagttctccaaaacaatgaacgccgttgatttaatgtctcttggcgtaggagctgtcatcgggaccggtatttttatcttacccggaactgttgcagccacattagctggacctggcgttagtttatcctttgttgttgcagcaattgtttgtgctttagctggaatgtgttatgcagaatttgcttcagcgatcccagtagctggttctgcctattcatatgggaatatcgtttatggcgaatttacaggctggattatcggttgggcactgattttggaatacatgctatctgtagccactgtggcagcaggttggtcatcatacttcagttctttcattgcaccatttggtctaaaaattccacacgctatttctggtcctatgaatcttaacaatggcgtttattttgacttggtttctgttttaatcattttacttatcagtatcctgttgtcacgagggatgaagaactcaattaaaattaatgtcgtagctgtttttattaaaatcgccattattttaatttttatttttgtaggcttacagttcattaaacctaacaactatcatccgttcttgccatatcatttttcaggagtcatcaaaggagcaaccacagtcttctttgcctttcttggctttgatgttgtttcatcatcagccgccgaggttaaaaatcctaagaaaaatatgcccctaggaattattggcactttagctattgcagctgtactttattttggcgtttcaatcgttttaacgggtatggttaattataccaagctaaacgtatctaatcccgttgcttttgcattgcaatatgttcatcaaaactgggtagcagagttattatcatttggtgctatgctaggaatggctaccatgatgctgacaatgatctattcaagctctcgcttaatctatgctatggcacgtgatgggctattgcctagtgcattcagtaaattagataaaaaacataactctcctcaaaatgccttagtcgctgtcactattattattgcagcaggtgcagcattcttctccgttgatcaactagccaatttggtcaactttggtacactttttgcctttactcttgtttcctttggaattctaaaattaagaaaaagaacagatattgttaacgatggctttaaagttcccggatacccatatttgccaatcatttctggtttaatttgtatctttatgatttgccatttaagttcagaagtttacttaatggcagctatttggttaatcatcggtgctgtaatttactttatttatggctaccaccatagtcagcttgatcatgattaacatcagtaaaaattatgtaaagaaaaagacgattcgcatgaatcgtcttttttagctctgtttgaactagttaatttgattaattgcctgaccatctttaaagaaagacaaaacattattcgcagcttctttagacaaattaaatctagcaatgtgagtagctgaaccaacgtgaggcgtcatgatcacattatccatttcaaccaattcaggtcttggatgcggttcgttttcaaaaacatctaaggcggcgcctgcaattgaaccattctttaacgcagcaattaatgcatccccgtcaatcaacgatccacgagcaacattaattaaaaacgctgtgtctttcattttctttaaaaagtctgaattaaccagatgatatgtttcagctgtagcaggagtatgtaaactcacaaaatcagcttcttttgccaaagtatctaagtcaacatatttagcatctaattctgctgcaatttgatcatctacttgatgacgattatgataaataattgtcataccaaatgctttagcgaacctagcaacttgttgaccaattcgacccatacctacaattcctaaggtctttccttcaatggagtacccttggttgtcgtactcatcggcatttaaaaagacgccttcacgcaaagcatggtcataataatgcaatctacgagctgatgccataatcattgtccaggcaagttccgccgttggacgcaacacactcttagggcaatttgaaacaactattcctttttctttagcgtattcaacatcaacgtggtcaaagccaacgccataagttgaaattatttttaaatttttcgcagcatcaatcatttctcgatcaaaagccatctttgctacgatcacaccatcatattctgcaatatgatcaagcacccactcacgatcatcttctggtcgatgtcctactggaccgatatcaacttgacaaatattttttaaatcagttaaggcctcatctcttaagccacctaaaactaaaacttttgctttattcattatttttagacctctattcaattttcatcttaaagtaaaaataccactatttgaaagagaaaacatctactttaatattttattgattgcaactgcaacaccgtcgtggtcacaatcagccgtaacttcgtcagcatgttgctttgtatattcaacagcatttcccattgcgatacctaatccagcataagttaacatcggcatgtcgtttgcttgatcgcctagggccatcacattacttcgatctatttttaagtagtcacatagtcttttcaggccagtccccttatcgacaccggcagcggttgcttcataataaaaaggctcagtctttgaaaatacaactcgatctttcatcatttcaaataaaggagattctattttctcatctaaatagtctgaatcatcaacatacatacatttgatgattggtatctgcttcatttcttcttgtgtacgatatgagacttctaattttacgacccgtgaattataaattgtataatgtcccaaatcacggttagctgtataaattcgatctaacgatacgctatgaaaatgtaagtttagctttcgcgcaattgtctctaaatctacataatcttcatattttagcccctgtttgaaaataacctgccccgcggttgattctacaactgcaccattaaaactaactacatactgattttcttggccattaagccctaattcatctaaataacgttgagcacctgacaaaggccgacctgtgcaaattacgatttgcttgccttgtttttgagcagtcaaaattgcttttttaactgctggtgtaatctccttcttagaattaactaaggttccatcaatatctatcgcgattagtttaatttcttccattaccttttcccttaaaacaaagaaagcaccgcttatgcgatgctcctattaaacagccatggtctgcgtattttcttttaacttgaccaaatcagccatatcatcagcactgatttcaaaattgatgttcaagttttcctgcatttctttaacattatcactcttcggcaaaacaatacaacctagctgtaagtcaaatgctaacattaattgagctggactaacatgatacttttcagcgtaagtcctgattcttggatcctttaacaaacaaccatgtgcaagtggagaatatgcttcaatctgaattcctaaatttttacagtatttcatcaaatcagttggcacatttcctatatgaacttcgatttgattaactactggcttaattgagctgttattaacaatgttagctacgtcttcttgtaaaaaatttgaaacaccaattgatctaactttaccggctttaagtgcttcttccattgctctccagttttccagattgccttcaaagtgacgatcattaattctattcacttcaatccaaggttgtggtgaatgaattaacaacatatcaatatattccaaactaaatcgatctaaagcgtcatcaattgcttttttgtaccttcatagtctttaatcgaagttggtaatttagttgttaaaaatatcactacgctcaacatcagagttccaaataccttttcccacaccactttcattgccatagtctttagcagtgtcgaaagcgcggtaaccaacattaatcgcttgacgaattacttttcgtacatcatcgttattaattagccaagttcctagttgaattcgaggaacctctactccgttattgagcattaaagttttatcagagtacatatatacacctctacattttactaatatgtctctgtttcttaattcctgtatttgtatagctaataacaattattaaacaataattgtttttttcagccatctgttaatagagtacaacaaaattgttgcaaatcctatacatacattttattttttgtgattctgttatattttctaattaaaatagtagcatcaatcaatgctgctgggtttataaagattatcaaataatttattttattattctatacaaaattaatattttcgtataaaaaaagaaagggctgatgatgtcctatcaactctttctcttcagtctcttaattcccaacacctataataccagcatttatcatttaaacaaggataaaaaacatcttttacttacttttagttttcacattatagttttcatcacatgtttaaaaagcttagatgctatattacaaaatgattacaagagaaatatagatcatatagttcactattagctatatgcaaatactatattttttgagcaataagctgcaacaatttttgagcaatctttcgcttactcattttaggccatttcttagttgacttatttttttgtaaaatcgttacctggtcttcatcattgccaaaaacatttttagaaacgtcatttgctacaatcatatctgcaccttttgaagatagcttttttgcagcattttgtagcaaattattcgtttctgccgcaaagccgacaactatctgccctcgctgcttgtggctagcaacttcgcgtaaaatatctgtcgttttaactaaagttagagtcaaagtttgttgatcagcttgcttttttaatttatgatctgcaacttgtttcatgcgccaatccgctactgcagcagccataattaaaacgttactatgcttaaattcttttttgactgcaactaacatttcttcgctactagaaacatgaattaatgtaatcctaggattttgtggcaaaggcatacttacattaccatatattagctttacttttgctcccatcgctgctgcttctgtagctaaggaaatgcccattttcccactagagcggttaccaataaagcggacgggatcgattgcttcttcagtaccaccagcagtaataacaatattttttccttgcaaaacgttctgttgttcagtgaaatttttgatccacgccacaattgctcctggctctggcattcgtcctttagcagcatagccttctgccagcatccctactgcaggctccattatttctacaccatgttctttcagaaaagctatatttcgctgtgtagctggattattccacatttggtcattcatggctggtacaaccaatttaggtgcacttgtagctaaaattgtagtgctagctgcatcgtcagcaattcccgttgccattttagcaataaaatttgcagtcgctggtaaaaccagagctaactctgtccaacgcgctagatgaacatgtggtatgctagactgattttccttgctccataaatcatccaaaacaggatactttgttaaagcagccagtgtattagtagttacaaaatgctctgcatttttagtcattactatttgaacttgatgacccgctttttctaaatcgcggataacgttaactgccttataatcagcgattccacctgtcatataaattgttattcgactcattttaccattcctcgtcatctaaacttatttttattttatcattgtccacttaaatagtagaatattgtgttgggagttatatttggaggaaaaattgaaaaatatgcaaaaactacttttactaactatattcttacttagcttatcggcctgcactaaaccacaattatcctctgtaccacgtgataaaagtgccactacaatcaagattgttgataggaagcttgagttgcatcagcccactaaaaggccacttcaacctttaaatggaattttgcctcattggctgcaaatgccagataaatctctgcctaagccagcaatttatactaatttgaatactgttcttaaaaacaaatagggaaatgattagtttcatcttccctattttttgttcaatttacaagttgctttaaaaatagttgttttatattaatgagtaatttaaaatttatataatacagaaaggaactttatatatgccaaatttatccagtgatttaacttcaactattaatgagagactaaacaacttgaccgcatctaaaattcgagcatttgaccaaaaggtctctgaaatttctgggattattaagttaactattggtgaacctgatttagcaacacctgatcatattaaagatgccgcaattcgtgatattcaggctaatgattcccattatgctcctcaagctggtaagccagaactacttgaagctattagcaattaccttgaccgctcaattggtgtacattatgatccaaaaagtgaaatctgtgtcactgtcggtgcaacaggtgcattaaatgatgtctttatgaccttgcttaaccccggtgacaaaattttggttcctactccggtttgggctttatactttcagctaattaaaatgactggagcaatccctattcaagtcgatactaaaaaagatgacttcatcttaacagctgaacatttacgtcatgttctcaatggtcgcggtaaaggtgcaaaggcaattattttaactgatccttctaatccaactggccgcgtttattctgccacagctctaaaaaccttagcagatgtcattaaggaatacaaaatcttttctgtaactgatgaaatttatgcagaacttgtttatggcaaagccaaacatcactcactttctgaatacatccctgacagaaatattttgatttccggtttatccaaggcttatgctatgactggctggcgtttaggctatattgctgcccctaaacaaattatgaagagcatccgcaagattaattcatttttagttacttcagttactgataacgttcaaatagctgctgtcgaagccttaaacaatggtcaaaacgatcctaaaaaagcacgcgaaatctacgaagcacgtttaaactttatgcaatctggcttagaaaagttgggctttgaaatggccacaccgcaaggagcattctacatttttgctaagatccccgaaaaatatggcaccaatgatgagcaattcgcttttgagctggctcaaaaagcaaaagtcggtgtcactcctggtcgctactttggcaagggcggtgaaggttatgtccgtctttcttatgcatcatcaactgagcaattaaaagaaagtttagctcggattagtgatttcgttaataatttataattcagataaaaaaataagtgatctcaatcaaagcgagatcacttattttttattatattgatttattacttatcccaagttgaattttctgcagcatcttcagcagccatcttttcaagacgctcttcagttgcctttacactgtcttggtacttttcctcaacttcgatccccaagtcagctaattgttgatcagctactggagctggagcatgcatcattggttctgaagcagaagcattcttagggaatgctgaaacgtcacgaatattatccttatcagcaagcatcattgcaaatcgatcaagaccgatagctaaacctgcgtgaggtgggaagcccatgtccaaagcatccatcaagtaaccaaattgttcatatgcacgtttcttagtgaaaccaagtgccttaaacatattttcttgaattgagcgcttgtggatacggattgagccaccgcccatctcatcaccattcataacaatatcataactacgtgcgtgagccttatgaggttcagtagttagcaacttaaccccttcatcatctggcatagtgaatgggtggtgagctgctacccaacggccaagtccttcatcgtattcaaataatggccaatcaacaacccaaacaaagtcataaacacccttaggaataataccagtttctttggcaaattcacgacgaaggtggtcaagtgaatcacaacataccttccacttatcagctacgaatactactaattcgccaccttcaagatcaaattccttcttcaaagcttctttgttctcatcagtcaagaagcgagcaacagggcctgaaaattcgccatcttcaaatttaacccaagccaaacctttagcgtggaatcgtttaataaagtcagccttcttgtcaatcttcttacgtgagtattcttttgcaccatttttaacagcaattcccttaacaaaaccgccatcagcaattgcaccggagaagaccttaaagtcactatccttgaaaattgggcttaagtcatgaatcaacataccgtaacgagtatctggtttgtcacagccatacttgttcattgaatcagtccaagtaattcgcttaattggagttttaagatcaatgcccttgacatctttcataattttcttcaaaagaccttcagtataactctgaatagtttcttcatcagcaaatgacatttccatatcaatttgagtaaattctggttggcggtcaccacgtaggtcttcatcacggaaacaacgagctaactggtaatacttgtcaaatcctgcacccattaaaagctgcttgaacagttgtggtgattgtggcaaagcgtagaaactacctggatagattcttgatggtactaagtagtcacgtgcaccttcaggtgatgacttacctaagattggagtttcaatatcaataaaaccattttcatcaaagaattcatgagtagcacgcaaaatctttgaacgtaaaataattgcttgttgaacttctggacggcgaagatcaagatagcgatactttaatctagtttgttctgagacttcaattccatctttaatttcaaatggagggttcttagccttgtttaaaataatgatttcagttgcatcaacttcaacttgaccagtcttcatgtcagggttaacttctgaacgcttaacaactttccccttaacttgaacaacatattcattaccaagtgaatcggcaatatccattaacttcttaccagaatctttgttaacaacgatctgaaccaagccttcacggtcacgcaaatcgatgaaaaccaagttacctaagttacgtacacgttgtacccaaccatagagatttacatcttgaccgatgtatttttcagtaatattgccacaataatctgttcttttttcgatcttttccattgttactagtccttcaattcatccattattttagtcatgttatttagatcttcaagacttaaatcgattgtcttgccatcagctaaacgtttaatattcaaaacgccgttagccagttccttttcacctaaagtaataacatacttagcaccttcacgatctgccttcttgaattggttctttaacttcttctgattgacatcaaagtcagcttcaaaaccttgattacgaaggctacgtgcaatttcaattgccttttgtgcagtaccgtcaccaatattagtaataaagaaatcaataccgcgtttctcgaataatgcaggattttgctttttaagcaccaacatcaatctttcttcgccaatcccgaaaccaacggctggagtagcgggtccattgaattcttctaccaagtgatcatatctaccaccaccaagaatagtagttgcactttcccataagctcttatcttcaaccataaattcaaagataattccagtatagtaatcaagtccacgtactagatcatcatcaattacataatcaataccaagttgatctagcatcttcaagattgcttcaaaattagcttttgaatcgtcatccaaaaattcacgaatcttaggtgccttaggcaagaacttcttatcacgttcatctttagaatctaaaatacgcaatggattatcacgcaatcttctttgtgagtcttctgataactcatctttcaaaggagtgaaataattaaccaaagcatcatgataatcttgacgtacttgctcattccccaaagtgttaatgtgaagttggtaattcttaacgcctaactcacccaataaatcatgtcccatcatgattgtttgtacatcacttaatgggttgcttgagccaaagctctctaccccaatttggtgaaattcacgttgacgaccggcttgtggtctttcatatctaaaagttgattccatataaaaaacattaaatggcttaacaacttctggcgcatacatcttgtcttctacataagcccgcactacgctagctgttccttctgggcgaagggcaatatggcgaccacccttatcatcgaagtcgtacatctgtttttcaacgatttctgaactatcgccacttgaacgagcaaagatttcataattttcaaaacttggtgtgcgaatttcacgataatttgcgcgattgaagaaatttctggcagtttcttcaactttttgccatgaaccagattgatcaggcaaaatatcaactgttcccttaggtttttgaactctcatttaatcatcctttttatattttgataacttgattaaaaataaaaagcgcccttgaacttaatcaagggcgcttagattagcacggtaccacctttttggttgctgcgattaacgctcgccaaacgatccattatctgttaaaggtgtcacagaccgcgatctatctactctctcaccacaacgagcagtctctttgaatagatcattgctaatctacattctttgtcatcgataattcttacttagcttatatttttctcaagacattgtcaacctttgcggtctcattttttcgctaaagatctaacacaatcgtgaatggaccatcgttttctaaactaacttgcatgtcagccccaaactcaccagtctcaacgtggaaaccgtcattttctagttcttgattaaagtcttcccaaagttctttcgatcttggtggacgcatcgcatcaacaaaactaggacggttgccttttttagtatttgccatcaacgtaaattgtgataccgacaaaatttctccgttaacatcctttaaagacaagttagtcttcccctcctcatcttcaaaaatacgcattttagctattttatcagctgcttttttgattactggcaattcatcaccatttttgatgccaactaataataaaaagcctttaccaatcttgcccacagttttaccgtcaatatctacttgagcatgatttactctctgaattacaactcgcattaattatctgacctcttagtttcgtatacgtctggaatatcacgtaatttactcaaaatttcatctagttgatctgcattccgtacagcaactgtgacatacatatgtgcaacattatcttcgtttactttaccagaaatattattaatattcttagtaagtgaattcaacttattaataacgtcactaagcagattggaacgattgtaaccaaagacttcaatatttgcattaaaggattgaacactattttcctcaacattttcccattcaacatcaattaagcgaccttgttcttcagcttctttggtgatattacggcaatctgttcggtgaatagttacaccgcgacctttagttacatacccaataatcttgtcacctggaactggattacaacacttagctaaatgaagcattaagtcactaacgccttggatcatgacgccatttttatgcttaaccttcattgtagtatttgaattcttcttaggttgttcttcttgaactgcttgttgtccagaattcaaaatcttttcttccagctctttttgtttttgattttcttcctcacggcgcaaatcaaccgtcaagcgattaaccactgcttgagcagaaagatcaccaaagcctactgccgcatatagttcatctgcagtgtgataattaaagtgctctaatagcttttcaattcgatccctggccataaattctttgggtgaaagatcctcatcgcgcaacatatcagcaatcaattgttcaccatgctggatgctatcttctctatcctgacttctgaagtagcgtctaatcttgttgcgtgctcttgaagtcttcaccatgtcaacccagtcacgcgatggcgctgcattagtctgtgtcataatttcaataacatcgccattgcgtaatttatagtccaaaggaactaatttgttattaactttggcacctactgcatgactaccaacttgagtgtgaattgcataggcaaaatctagcgtaaccgaacctttaggtagttcatatacttcacctttaggcgtaaaaacataaactctgtctgaaaaaatatcacttttaacagacttcataaattcaccggcatctttagtttcatcctttaattcaaggatttctcttaccatatccagcttttcaccagaggtactttgctcaacaccagtaaaattgccacgcttataagcccagtgtgcagccacaccatattcagctactttatgcatttgttcagttctaatctgaatttctagtggacgaccgccaggcccaataatggttgtatggagtgattgatagccgttaacctttggcatagcaatgtaatccttaaaacgacctggcattggcttccattcagtatgaacagcacccaaaacagcataacaatcacgcacatttttaacaattacacgtacagccaataagtcataaatctcatcaaaatctttatgcttattaaccatctttttatagattgaataaatatgcttcggacgaccataaatttcatatttaatgcctaattcatttagagtcttcttcaaagtcttgattgtatcggcaatatatttttcacgctggcttcgcttgacatccatcaagttaacaatgcggtaataggcttcgggatttaagtagtggaaagacatatcttctagttcccacttaattgtcccaatacctagacgatcagccagcggtgcataaatatccattgtttcggaagcaatacgccgctgcttatcaggtcgtaagtgttgcagagtatgcatattgtgtaaacggtcggctaacttcaccataattacacgtagatcttgagccatggcaatcaacattttacggtgattctcagctaaaaattcttgatgagacttgtactcatatttgtttaacttggttacaccatcaacaataaaagctacatcttcaccaaatttttccttcagctcatcatttgtaactggggtatcttccactgtatcgtgcaaaaagcccgctgcaactgtatcaggatctaagcctaatgtagctaaagttccagccacttgcgttggatgaataatataaggttgtccagacgcccgtttctgtccagcatgagctttattggcaaattcatatgctttttcaacaaaggccacctggtcatcattcatatactttttgcaggtatcaattacctgatcatgcgtcatttcaatgtatttggacattatgatcatcccctctagcggtaaatatttttattcattaagccaaaagcttcaattattaagtaaattaaaccaaacattaaattatacaaagcaaaatgtggcaacattgctaagcagaaaagcacaggtaacaagaaaattcaccacttggacaggttaagtttaataattaaattgcctagatggtatgcaatgatgctgttaataataaaaaacagaattgcttctcgccacactaccggcacacggcaaatgctaaagatatacggcaaaatcattaccaaaatactccaccagacaagtgacatccagcgatgagaattcaacttcctgacaattggaattgcttcgattttatttcctagttttttcattaaaagattgtgcctctcatcaaagtttaatttaattgataatattttaccatatttatttttcttttctagtaattgctagtcccatccagcgaccttgacgcatggttaaatcgaccttaaagccattctcgtctagagccttttcaatcttaggcaattgcaggtagtcaattccagaaaagataacttgaccatcgtcgtttaaatgactatccatttgtggaatcaagtctagtaaaatttctgccaaaatattggcaacaatgatgtcaaacttgcctttaacatcagctaacaaactagtcttttgagtgtgaatattattaatatcgtttaaggctgcattttgtttagctgcagtcattgattcatctgaaatatctgtggctaaaacatcagttgctcctaattttgatgcagcaattgccaaaataccggaccctgtaccaacgtccactacattcattggcttaaccattgctctctctaggcccatcattgctaattgagtagttttgtgatttcctgtaccaaaagctaagcctggatcaagcttaattaattgctggtccttaaaagcgggtttgtaatcttcccattcaggcacaattgccaagtgacgtgaaaaatcaatcacgtgataatacttttgccatgccgtgttccaatcttggtccttaatgtatgaagttgtaattttggcatcccctacatctaggccatagctcttcaattcctttaacttatcttggaatttttttactaatgcgtctttatctgcttcttcatcaaaataagcatagaaatatgtatccttaggtaagtctttaatgtcatccatttcaactacagtagaatcatgcaaccagcctgcttgctcaaagtcgctacgctttcttgattcaatacccaatgcattcagattatctaaagcaaaaacgctcaaagcgtcttcaacttcatgactagtatcaattttaataattagtaatttcattagtattatctcctttgggattttctttgcataatgctatcatgataacaggtgataaatatgtcaaagaagaaaaataaaaagaacaaactcgaaaaaacattggtcgaaaaaatcttagaccaaaataagatcaagtatcgtcaagctcaatttgctgtctccgaagataaaggcggagttgcacaaatgaacacttctattttagaagacaaagagcgtttagtctataaaactctcgtctgcgaaggaaataaaactggtccattggttggtgttgtaccagttactgaacatttaagcatgaaaaagttagctaaagtttctggtaacaaaaaatgtgaaatgcttcccttaaagaaattagccaaaacaactggttatgtacatggcgctaatactcctatcggaatttattttaaggaaaaatttcctatctatttggatgattctatgcaaggaaatcctgaaattggtgtttctagtggtgaagttggccggagtgtctttttgaacccagaagacttagccaaattctgccatgctccttttgttgatctaaaagaataaaaagcgcttacaatttattgcgttattcttcttcttttgtgttatattaaataatgtaccgcatacagaatataacaattacatagaagaagatgacaaaaatgaatttattgttaggaattgttggctttgtagttgccatgatcgctgcctttgttgttacggcattagcaattgccaagtaaataaagcaaaaaaataataacagatttaaaatgacgtggtttgatatcatgccattttttattttttatataatagttatttattatcaaattataagtatttaatatataaggctaaactatttatactaaaaagaaaagtcttgcctataaaaaaagttgaatttatatcagcaatgttatttatttgtgctaatctaaatatgttgtcaaatgtaaaaagaacacattgataataaattgtaaaagactcagtcttttacgttcccaaaagaaggtttagataaatgaaacacaaaaatgatttgagcttcaatgcaaaatttaatggaaaacaaaaatttggttttagaaagttgtctgttggtttagctgcagttgcacttagcactacttttttcttaagtaatagtcaacttgttcatgcggatactaatactgcgactaatgaagaacaaactcaacaagattcacaaaaatctaatcaagaacagtcaaataataccatccagtcgactcaagctgatccaagtaaccaaaataatcaaagttcaactaaaaattcaccaaaccaagaaaaaacaaaacaacaaacagtcgaaattaccgctttttatacagatgaaaaaggtaataacgcttctgaaataaaaaaagatgaatcagcttctttaatggctggtcaagataccatcaatgttgacattaaaatcaaccagcctaaattagatcaaaataattctttaactattaacttgccagatactggagaaagtaaaaactatcaaattaatactggaaaaacaaagattttcagtaataatgccggtagtcaatcttactgggatattacggcagtcgatcataatgacaatagtcaacttgttgccgtttagaataattcgattagcaaagattcacccgactaccttgatttaaccatcccagctcttgctaatggatccacagttaaatcagatttaaaaaatcaggctttcaatgtagaaattgatggaaaaagccaaatcgccttcacagctgatttaacaccttacaaggataaagttaccccccaactgaattgatccatggctttgctatgggacaaaagtcattcaacggttctgatgatggtaaagtatacccagagaaaaacaatatctcagaagaagatattaaccaattaaaattaaacgatgacagtcacctgcttcaatggggaatctatttcaattatggtaatcaattaaataatcctcccctttccttgtataatgcaatatttaaagttgcttttagtcaagatcaaactttaattccttcttcaatcaaagtcttcgagattccaagtggaatgtccgtggatcaaaatgcattacggcacggaattaaggatttttacgatggagctgataagtccgatgaaaattactacagcataattgctactggaaataatgaaaagacaaaatttgcggactttttgcgtgctcatttagttaaaaatgcaactggacaagctactggtttctcagtaaaccaaactggtcaaaaattcaatcctaatgatcctagttatgactacagtacccatgcatacttcattcaattagatactgtactaagtaataaatctggccaaccaactagtagtactggcatgacctctgatacatcaaaaaatactttagctggtcaagggcttagtgctgattacaaaaataaagacgaccaatcagctaatacccctattcaatttagcaggttagaagaagcattagctttatttaaaaataagcactataaaattgaaaaagtttctggcgccaatgccacattaaaaacggacagcagtatcggctttggcaacttttataataatgaaaatgtagatcaacacttcatcatttacttagttcatgaaacgcagatagaaaagcaaactgctacagttggggaagaagtaaaaggctactatgtaaacggtcctaagagccaaaacttttccggtataaataatccagatgtggctgttcctaaaaatgatgaaacacctactccaaatgtagtaaaagaagttatttactctagaagcagggtggttgatttagttaaggatccgcaaggcacagaaacaaactggtcacaatggatatcaaacaatcaagcattttcagctattccgtataacaatactacaattaaagacataattgatggccattatcatttagataaaaatggcgtgattcacattgcttcttcacagaataaacttactgctacaagcaattcaattactgagatttccgcaattgcacctaattcggagtttttagcttcaattgcttctaccacagttaatggtcaaaaaacaacaactggcaatctagcaactattagcatttgggtaccctatagttactccgcttctaaaccggaaccaaccccaactcctattcctatacctgaatctgagactccgactactccagaacaaccgaagcagccttctgagccgaatacaccatatgagtctgaaccacctaagtctatgaatacaaacagacaaagattcacaaaaaagtaaattggaattctagcagtcatccttatggcactgatatgcaaagacagaagcaacacaaagatggaattattccaccccatggaactgccattaataatattccaaattcaacaacaaagactagaactactaataatatcgttaagtcttacaataatattagttctaaattaccacaaactagtcaaaataattctaacctgagcttaatcggtctagctttagcaacactaggactactgggatttactattacaaaaagaaaacatgattaattaacaatcgcaaactaaaagagacagaccaaaaatctgtctcttttttctaccttaatttatttaatctgcatgtctccacttcttatcagttaagatacgtgcagctaaaagacctaatggcaaggccacgacaatcatcaacgcttctacgatccaataagccccgatattaatattcgtgattccaaagttaaatacagctcgatacatgtaaagaccaggcaccataattacaattgatggaacagtaattgcaattcttggaaaaccaacttttttccttacaatacttgctaatagaccagctgttaaagcaccaataaatgctgccaaagctggagcaacctgagcataatcgactaagctaagacgtaatgtatttgccattgctcccattaccgcggctgtagctgccatttgtggtcgactgttaaacataattgaaaaaccaaacaccccacaaaagctagccagcaatcgcaagcaggttaacgtccctggatcaatttttaacttaggcatagatcctggatgcaaacgcaaaattgttgctacagcccagcctgccatcgttgcaattacgataattaaaatcgcataagtgagccgttcaagcccagagcgcatatctaacttagacatgtccaatccagatgtaataaatggaaaacccggaattacgaacaacatggcaccaatatagccataggcatgatcatgattaatgtggaataatatttctcctacatgaaaactcataaagtaaacactgcaggctatggcaaccgcaaccgcaatcttggctaccaaagttaacctgtgcttacccataattgctctaatatattgaccgcaagctgcacccaaaaaagcacagatcacctcaggaagaccgccgcctaataagaaaataaagccgccgcaggccaagcctgaactaagtcccgaaattaacggagaatacgctgacttttgctgagaaatctcccgtaagcgtttatgaatttgaccgatagtccattccccatgtcccttttcaaattgccgaacgaatttttccatttcattcaacttagtcatattcacacctgttgctggtaacgataaagtctgggaatatgattcattatcaacatcaaaacaggtatattcaattgacactaatccaatatccgttgaacaggtaatgcccaaggttctggcaaccgtatccattgaatcacgtactcgccaagcacctgtaccacagcttaaaagcataatacctactcgacctacaatcgaggtcttttcaactaatgttgcatcctgcgccatcgtattattatcgctcttgaaaaattcctcccacagaatcttcatatgatgtttttctgataaatgatgttctcgatcaatttcactcatgctattattacttttcctcacatagttcgcataattataactattatattctaccacaggaatttcatcataatttttgatattttaaaatttgctgcttctttttattattttaaatttataatagacatataagttattttgaaataaaggatgatttaaagtggctcaattaactgatgaacaacttgctaacattgctcatgacttttaccttagtcagcttaatattgctgatatctcacaaaaatatgatttatcgcgatatttaatcgctaaagcactagaagacgcgcgtaaccgtggaattgttaaaattaaaatctcgcgtggaatcaaacgcaatcaggtactagagagagaatttcagaaaagattcagattaaaagaagcttttattgtcgaaactaccggcaaccgcgatgaaaatagtgaagccgtagttaacttcgctgctaaacaaattgaaacctatctaaagcaagcaaaaatcgctggtattagttggggtgcaacaatgcatggcgtgatcaacgacttttttgagcaggacttagagcaactttactttattcaattacttggtcaaccaattaattctaaccgcaggaagaatccattggcccaagatgcggcagaaaaattgcattcccatagtctaagtctgccaaccccactttatatactaaatccaaagatcatgcctgccttgaaacatgagccttattttaaagtaattgaaaattgttatcatcacttagacatgcttttcactggtcttagtactttccaatcatttcaagctaatcaatttttgaaagaaaattatggacctgaactatttaaagacattcctgactgcgatgtagctggaatgatcatgggacgaccatataatattaaaggtgaatttttccctgacttcgaacaacacatttgtggtatcagcatgaatgacattatgaaaacgccaattcgtttttgtgtcgtccgcaatcgctttaaatctgaggcactccttggcgccttacgtagcggtatcattactcatctagtaactaatgatgcaattgcccaacgcgttttgcaaaatatcgattaattcgctaaagtaatacagagatagactatttataatgaggagaaaaaatgaaaaaatctaaatatgatttatggattggtgcactgaacctgatcaattgtgtgttattcattagctcttggtttgccatccttggagctgacttcactgctagaatagctttaatattttacttatttgcctggttcggcgtgatccttaatgccgttgcagtagtgcaatcgcataacatgaatatctcactaattgggccaattttaggagtaattggtaatgcactatatggctttaccgctgctctagccttacctgctgtgattgttaatattatttctgccttctttatctttatgcaacatagcaataaaaaatagaaaaaacagccaaaaattggctgctttttctatgctaaaatctgttatgtactggtcaacaattactaaagtggatttacaatgactgggaggtgagaattatggagtttagaattgacgaatgtattccagatgttgtatcaatgatggctttagcacaagcaattgcaaattttgacctcaatggtaaaaagccacaagatgtgaacctaggaaggatggcaaatgtctaaagtttttcgaaatgacttaaaaataaaggacatccctaatcaaagaaaacttagggatgtctttttttagcctaaatatgaaattgctacttgtaattgtgccagcttcattgccgcctgagccacattcttgcgatcaacatcaacaaaaatctcacagtgtttttcatcaaattcataacctgaccctagcgcaatatcttccgcagtttcatataactctttatcttcttcattaggatctagcttaaatagaattcgtccgccatcactaacgcggcaatgatcatcggcttcctcaacccaaacatatacggtatcgccataagaatcaatcatcattgtggcaatctgcaatgtcctatcgtcaacccaaattgtcttggttaccttagcaacatacgaacctatttcatggttaattttctttaattcatcctgcttcattttttacctctaatttataaattcttttcttcccggatttaaaattgaagtgcaacactaagtgttaaacaaaaaggccatgaagacctaaacttgaagtgaccaaaaatcaagaaaggaagatcttcatgaccaactcaaattctagcatttccaagcattatcatcaattgaacagcgaacaacgtggacaaattcaagctctgcttgattctggcataacctcctgcaatgctatcgctcaagaagtaggctgtcataaatcaactatcagccgtgaaattagacgaggcagtgtcctgcaaagagacagcagctatgtcttgtatgagcactattacgctgatactgcacaaatttatcatgaaaagcgccgcagaaactgctataagtgtaatccactgcaacactatgccgtctttttcagaatgctaagcagacgctttaaagccaaatttgatgccaccagcattgatgaattcgttggtgaatttcacaggattatgccaaattatccatgtcctagcacgcccactgtctatcgttatattgatcaaggattgctggatataagcaatatcgacctgccaatgaagcttaaaagacgcagaaacaaacgccatcatagtcatggtggccatgctccgcataaaaagaatcttggcaattcgattgaacagcggcctaaagaagttgaaaacagaaaagttcccctgcactgggaaggcgatttggttaaaggcgtcagacgtaaaaatcaacctgccttaatgacactgactgaaagaaccactcgttttgaggttgttatcaaaattcctgactatcgggccagtacttgtcaaagactgcttcaaaaggagattgacagacatcctaattggtttaaatcaattacgtttgacaatggttctgagtttgcggatatgaccaaaatcaaaggatgtcagatctactttgctcatccatattctccttgggaaagaggcacaaatgagaactgcaatggacttctgcgtcaattcttccctaagggcaaaagcatgaaagataagtcagctgcttatgttcaacaggcaactgatgccattaaccgcaaacatcgtcgaatcctccaatatcacacagcagaagaactcttcaagcaatacgttccttcatagcctaactgttgcacttaatttgacaattcaggaaattcttttctttaatataaggataccctcttagtaattcttctacaaatttattaaatagattgaatctcccaatcagcttgactgttaccgcttactaattataccttgtaaatatactaaattttggagaaaaatatgcatactaagggtttatcagttaaaaatgttgtagcgatcggaattggatcggcaatctatgttattttagcacgtttcacatcgattcctacgcctattcctaacacaaatattgaattagtctttccttttttggctctttttgcgtcaatctatggcgctaaggtcggttttattgtcggctttattggacatgctttgtccgatttcattatgtacgggcagacttggtggagctgggtattagctactgctgttttaggctggatcatcggtttagcggccaaacgcttagacttaaaaaatggtatttttggtattaaacaaataatcttttttaatatcattcaaattattgccaatattctcgcctggattgtagttgcaccaatcggtgacattatcatctatagcgaacctgctaacaaagtttttgtccaaggaatttcggctacgctttctaatggtattacaattatggtcattggcacgctcctacttaaagcttatgctggaaccaagattaaaaaaggcagcttgtgcaaggaggattaaacaatgcctaaaacaattattgaattcaaagatttttcatttaagtatgacagtcaggccgagccaacactaaaacagattaatctaactatcaaacaaggtgaaaaattgttaattgctggaccatcaggttcaggtaaatcgaccattggccgctgtattaacggcctaattcctaatctagatactggtgagatcaccggtgaatgcactattaacggcaagaatattaaagacactaacctatttgatctttctttcaccacctcaactatcctacaagatactgacagtcaatttatcggcttaactgttggtgaagacattgcttttgctttggaaaacgactgccaaccacaaaatcatatgaaacaagttgttcatcgctgggctgatgaattagggattgagcatttattaaagcaggcgccacaaaatctatctggtggtcaaaaacaaattgttgctctagctggtgtcatggttgatgaatcaccaattttactttttgacgagccacttgctaatttagacccagcttcaggaatgaaaacgatggctttaattgatcgcattcaaaaagaattaagtgcgacagtaatcattattgaacaccgtctagaagaagttttgagtcagcctatagatcgcattatcctaattaatgatggtgaaattgtagctgataagaagccaaatgatctattacatgagaattgtttagaagacgttggtgttcgtagtcctctttatttaaatgccttaaaaaaagctaacgtcgaccttacgcgtattcccgacctaacttcagtcgctgctttgccccaagatcctgaaattgctaagcagttgcaagaatggcaaaacaacattaccctaagtggtgaaaaagaagagactcatcctttattagaactcaaaggcgtcggccaccgttatagtaaattgcagattcatcctttacatgacgttacagcgacaatcaatcaaggcgattttgtttcaatagttggtcaaaatggtgcgggaaaaaccaccctttgtcgaattatttgtggctttatcgacaatgagggacttattttatttgatggtgataaccttaagcagttttcaatcaaagagcgttccgataagattggttatgtcatgcaagatcctaaccagatgatttcacaaaaaatgatttttgacgaagtagctctaggcttgcgtctacgtggttatgatgagcagactattcgcactaaggtctatgatactttgaaagtttgtggtctttatccgtaccgcaactggccaatctctgctttatccttcggtcagaaaaagcgagtcacaattgctgcaattttagtgcttaatcctgagttattaattcttgatgaaccaactgcagggcaagattggcaaacttatactgagatcatgaactttttaaaacagcttaatgatcaaggcaaaacaattatgattatcactcacgatatgtacttgctgatggaatacactaacagatccctggcttttgctgatggaacactaattgctgacacagatccaatcaagttattaactgaaaaagctttaattaaaaaggctgctttgaagcgaacctccttatataatctcgctatcaaatatcaattagaaaattcagatagctttgtccgcgcctatattgatgcagaaagggatgaaaaacatgcataatgaaagccaagttttaggttatcaacctggtgattcttttatttatcaattaaacgcaaccactaagttagtttttatactcctagtctcggttgcttgtatggtaacttatgataccagattcttaattgctatctgtattttatcaattttcttgtttaaagaggcaaaaattaagtggagccagatttcttttatcgtgaaatttattgtagttttcatgttgctaaatctgatttttgttttcatctttcagccaagctatggtgaaaatatttatcattctaaaagcatcttgatccatgccggctacttcacattaacattgcaagaggtattctacttattcaatcttttcttaaaatatgtctgctcaattccaatcgtattgctgtttctattaactactaatcctagtcaatttgctgcttcattaaataaaatcggcattagttacaaaatttcctatgctgtttctctagctctacgctacatcccagatatccaaaattcttattgggatatctcagctgctcaacaagcacgtggcaatgaactatccaaaaaggctagtttaggcaaacgaattaaggggacattgaatatcgtgatgcctcttatcttctccagtttggatcgaatcgatacaatttcaacagccatacaattacgccgctttggctcaaagaaaaaacggacctggtatgtcacccaatcatttaaaaaagctgattatcttgtaatgatcgtagccgtgattttggtattaattgtggttggtctctggcaacttgatcatggtagattttataatccatttatttagactaaaattaaaaggacctaatggtcccttttttgttttcgatttttctgtttatgatcatcttgagtgacaatctcaggtttcttaggaatcggcggcgtgattatttcataattacgcaaacggtgttcaagatagtcatctaatcgctcttgcgtattttcatgtacaataatcattaaatcacctcacttttcataattatacctcaaaaatgtaggttaaacagcgtaattactaagtatgccattccactagcaatcacaggacctgcagctacacccttgaaaaccactactccaataatagtacctaaaactaatgcaaccgtcacctgtggcaccgctgctaattgatcaacaccataacgtgacaagatagctacagcaattcccgctaaaatggcaatccatccagctggcgacttaaaagttttaatcagatccttaaagccaatctgtcctgtcgcaataggaactagaattgcaaccgaaataatagttacgccccaattaatcccctttgcttgaatagtaggcagccatttactagtaaacggtaataatttaaacaccattaccactcccgttgcaataattaatgacatgtttttacccactaacgctacaactagcaccaatgctagaaataaccaactttccatatttatctcccctcaaaaaatcattagcattagttcactttaacaaaaatattcatcaaaacaaaataatgagtctaaataagtgaaaatcaatctaatttgtgtcataataaaattactcagaaaaatatatgtatacgcgcacctcgttcttaaaacgaggtgttttttacgcaaagaaccagtgcagatattttaccttcactagttcttcttagttgatcgatattgcgatatgactttactactgcatcgtagttagaatttgcaaatatttatgcttgaaaataaaatatttgcacaaataattaaaaaacgtttcttgcaaaaatacaactaaacattttaataaaaacaaaaagatgccactttcgtgacacctttgtgattacttattcatacatttcgttttgaactaatccctaacttccttaatggtatcaatgatagtaccatcacgatactcaactaaggcaaccgtacgatcagtatattcaagtggctttggtacaccaacttgtttttcagcaattttttgcaattcattaatatccaagatcttaagtcctggcaccttactaaaggcatccactaaatcctggcgagctggattaatggcaattcctctttcagttactaaaacatcaattgatgaacctggagtaacaatagtttctactcttggaacaacagtcgcattacgtccccgaacaagaggagctgtaataatcgtcatcttggcaccagctgcggaatcttggtgaccaccgacggctccacgaatgacaccatctgagccagtcataacattaacattgaagtcaatatcgatttgtaaagctgacaagattgaaacatccaagttgttaaccactgcacccttattatgaggatcagcataccaagaagcatcaatttcttgttgatttttattgttagccattgattgggcagcacccttatcaaagtcctgcacatccataacttttctgactagaccttcttcaagtaagtcagtggtaggtttagtaataccacccaaagcaaatgatgcagtaatgccatcatcaatcatactttgacgtaagtacctggtgacagctaatgcagcaccaccagaaccagtttggaagctaaacccttgcttgtaatatggagagttaatgattacctggttaaccatttgagcaatcttgagttccttaggatccttggtaaagcgagtggcaccagaaccaatcttgtctggatctccgactttatcaattttaaccacataatccacttgatcttgctgaattgacgcaggcgtatttggataatcaacaatattatcagttaataaaacaaccttattagcatagcgagcatccattagggcatagcccaatgagccgaagacagcatccccatcttgaccgttagcattacctgcgggatcagatactggcacacccaagaaggcaacatcaaccttaatctcgccttcttcaattgaacgagcacgattaccatgtgagcggaaaattacaggattcttcaagccgccatgtgaaacaaaatcacctagtgaaccgcgcatacccgaagaagtaatattagtgattactccctttttaatcgcttcgataactttatcattcataacaccagtaagtgaacttggagccaaggttaaatcctggtaacccatactaataatcttgtccattaccaagttaaaaacataatccccatttctaaaatggtggtggaatgaaatagtcataccatctttcaggttattcttgattacctcatcaagtgaatcaataatcttattttgtccagtagtaactcttacctttggagcaacccgcttaacttcaggatgaccaatttcagtagtttcaaatggtttcaaattcatttttttcattaaatcatctggtaattcgcgttttactttattctccaatgtagttaccttctttatcaatcaagttagaagctttcgctgtttccaaaaccctggtagccttttctacaactggcttatcgatcatcttaccattaagtgaaataacgcctgagcccttagctttggcttcacgaatggaattttcaacattcttagcttgctcaatctcttctttagttggattaaagaccttattaaccatttgaatttgacgtgggttaaccaaactcttgccatcataccctagttcatggatatagttagtttcacgatagaagccttcagtatccttcatatttgagaacaccgtatcaaaggcatatacgtctgcggcccgagctgcttgtaaaaccatgttacgcgcaaattccaattcgcgaccatctggataacgatgagtatgcatatctgcagtatagtcttcgccagataccgccaagcccatcattaaaggcgttgcggttgcaatttctggggcatttaagacacccttggctgattcgatggcagccatcacgccaatagaaccattttcaatgtcaaattcatcttcccaatgttcgatatcctttaccaatttttgaatcattgcagctgattcagttttaggcaagcgaataacgtcaacgccggcttttaccattgccttaacatcttcatcgtaaaatggcgtggcttgaccattaacacgaactacaatttcactgccaccgaaatcgactgtcttaattgcctcataaaccaacattctggcagcatctttttccgttaatgaaactgagtcttccaaatcaagcataatcgaatctgcaccataaatgccagcatccttaatcatagctggattattaccaggtacaaacatcatggttctacgcaaacgattcttaacgtatggcatttagagcacctccaaatctggcttgtctgaagtttcggttgcacgttgtgcagctgctaaagtacgagccttaattacacaatccagtgctcccttatcggttgctttaaccttggcattttctaagccataagcttttaaggtgtcagtaatcaccttttcaatctgatctccataggccttttttacttctgattcaaggtcaatctcaatgccgttagaaccctttgaaatcatgatttggatatctgaactctcaagtgttcccgcaactgctgtggttttaatttccatcaatattcattcctttctcaattttagactgcaatttctgcatgttttgcttaataaattcataagtcgtttccggcacgaatttattgatctcttttaaattgccatccttgatcagctgtctaactttagtggcagtaataatttgaccgtctttttccaagcgatcaattacgattacttcaatctcaggaccaagctcatgcgctaggctaacattataaaagtgagtcgttcttgaaattggttctttaccaatataacgacgggtaatgttcagtcctggtgcaatttgattcttaaagacagctgcgtctatcaccgtttgtacagcaattaaatcgtcaggtgattttaagaagtatgctggaaaagtagctggtgaaaccatgtagtctccgccagagattactttcacattactaaactccttagtaccttcttgcaccaatttgaagcgctcatcaaagctaaacaaagaaacatcattagccacaacaaagacataaaccaaatcgttttcttcactagccatcttaatcaaatgttgatgacccaaggtaaacggatttgcattcatgactattgcagcgaccttcttatgctcttgatctgctatttcgggcacttcagccacaaaatccttcacatcaggcgttccattttctaaaaaggctgcctgatccgtcttggctaacaaattgaagtgcaagtgctcaaagctagttgcatactttgctttagtaaagacaaaggaatggaaaattccatcattagtcaaatattgcgttaaggctgtaaccgctttattaaagcgagccccctgcgtatcggcatcattcttgactccgatatactttaagacattaccagccacactaccagtaccaactaaattgccttcctcatcttctagcccaatagtatgatcaatcacgttaacttcgcgttcactaaaatcatttaaccccaatgattccaacaagttttcccatttttgcctagttgtagcgtcgtttaaaaacaaatcaacgactttatccataaatatgccgccttactatttcggtaatcgttttcacaaatatagtttactctcttagtttgattatttcaatttatctattaattttttgaatttttcaaaaattcagcaataatctcatgcgttttttctggttgctcagcctgaggcaaatgcccacattccggtacaatcgccgtttgaacatcttgattcagcatttttatcgcttgagtaaattctggattaaaaaatggcgatttttccccagcaattaccagcatgggaaccggcgtatccaaaatcatgtcacgccaatcttgctccgcatgttcaactaaacagttatagttttcggctggatcatatgggaattcttgatattcttttttagcagccaaaaacattttttcatcaatgtgatggtaacaagccttgccaaaatcaaatttaagcatgtcaggataattatcccaagttaggtctttaaagccatacttccagctcttatccgcaatcatctttggtgactggtctaaatcaaccattgcctttagtctacctttgccataaattgacaaatatgcccaaatattggcagcccccatggaatttccaatagctactacatcatgcaaattgagcttaactaatagctcctctaagtcaactgcatgacgactaatccgctgtccacgataggttcgttcggactgtccttgattgcgtggatcaagcataataaaacgataatcatttttaaataaggcaattaaatcttgccacatttgacaagatccccctatacctgggatcccaatcaaagcaggcttatcttcatcccccgtatcggtataatgcaaaattacatcgtcattagttttaaatttcatctttaatcttctttcattttgattactcaattctattatgacgcaaaaaaagcaacctggtgattccagattgcttattttttaccataaaccaataatcttcatccaaagaactccgacagttccaaaaataatcatatagattaatccaaggacaaaattcatcttccaccattcaccttgtttaacatagccagtagtagccaaaattgaggcaggaccattagcatagtgagtggttgatgcgttgattgcaccagtaaaggctaaaagcattgcggaaaggcctaaaggagcaccagttgcaaccgcaacagacaagaatggcaaataaagagcagtcatatgtgcagttccacttgcaaagaagtagtgggtgtagaacaaaagcaaaactagaattgccaatacaaagccccagctaacaccatgaagaccattttgaactaatttggagaaccaatcaataaatccgtatgaaatcagcttaccagccatgaacatcaggatagaaagccaaatcaagatattccaagcaccagtttctttcagagcatcctgcattgttaacacaccggtaatcatcaaaatagttacagccaggaaggcaacaaaagtcgcatctaattgtgggatcttaaagaaaccagacaaaacccataaaacaattgaaagaatgaagactgacatcataattttttctggagttgacattggtcccatttttgctaatttttcatcagcccatttcttagcatctggagtttctttaatctcaggtgggtacatcttgtaaataacaaatggaatgattactgccaatacagcaacaggtacgattgcagtgaaaaaccaacctgcccaagacatttgatagcccttttgtgcggctaattgttgagccaccatgttaggagcagcaccggtaataaacaaagccgttgataaaatattggcatgaaaggcagtaaagtcaatgtaggcaccaatctttttacgagaagcatcatctggcttagaatcgtagccttcttttgaaacagattcaacaactggccaaacgaccccacccgtacgagctgagttcgatggaattaaggcaccgagaattaattccaatccagtaatcgcataaccaatacccaatgacttcttaccaaatttttgaatcataatataggcaatacggttacctagacctgttttactaataccatgagccataatgaaggccatagcgattaaccatgcagcagagttaccaaatgaactaagcacgccttgattaactaccataccttttgcatttgtaacgtccttcattggtgctaagccaactaaaacagttactaccaagccagctaaggttgtaccaccaattggcaaaggttttgtaatacaccctacaattgtggcaacgaaaacggcaaacatttgccatgcctgaaccgaaaggccacttgggcgccatggagtaatacaccacaatacaattccaacgatcaaaggccaaataaagcctttataattcactttttctaaagttttcataagaatcccctattctctatggacgatacacatcatcaatgatgtcaaagcctttatctgctaagcttttatctacccaacttaaatcaacttctcctttgctaaaggcaattgctttagcctcatcctgctcatgaaaagcttgtgccttaggcaaaatctcaggagcatctttacgtggaatacaaattactccatcagcatcccctaaaatcacatcacctgggttaacactaacattcccacaagcaacaggtacatttatttcaccaggtccttctttatatggtccacctggggtagtactggttgcataaatcggcagtttccaatttcttaaattatcaatatcacgaattgggccaccaattacaatacctgcaattttcttttgatcgcgtaagtaagacatcattacctcaccaatcaaagatctagtgttatcaccctcgtcgtcgatgacaatcacatcgcctggctggcaatactttaaagccgcataaattgctaagttgtcacccgccctggtgtgaaccgtaaatgcgggaccaaccattttctcatcaggattcgacattaacttaattctaggattcatagcacaatttcgttccatgcaatccgcggtattagaagctgggatctttttaaaaccagctacaacttttggatcaggcatttgcctctttaaataaattctttttcctacaggcatagagtagctctcccctctttatgctccctaatctatcttgttattgttaaacaagcctttttataaaaactaaaactcatcacaactcacaattagtattatacacttatcaatagattaagcggttacaaattttgaattattttgattttttgcttattttttgaattatttaaactcaaataattatgcaaaaaaagagaactggctaattaaaccagatctctttacttgatctttgttattttgatcttattcaccaaagttttcccaaggcattacatcgattgcaggttgatcaagcaactcttgcaattcttttggtaaaaattctttcttcacaatcacatcataaacatattgttcaaaccaagcttgactcatttcgtagaagcccttgtgaccaaacttgtcgccccatgagttttcaaccttccacttacggatatgaccgttgtcttcatcaacaccgactaaagtcatatcgtgagtagcaaagccctcaccagtattcaaacgatcagccttgctcatttgcgtatcaacgtcaaataattggtcagtcttgtacaattcagtatccaaaaagccagtttttctttccatttgctttaaaacgtcattaccaaagctgactgcttcacctgccttaagttgcgccactgcagcttgagctaaatattcaattggcacattcaagtatttgacttgatcgccgccagccacattgtcataaagtggcaagtggtaaaccttgttatattcatggttaggaatgttggacaaagcaacataatcatcgaagttgaagtccttaaagtatttttgaacaaatgcttgtggagtcaaatcacgctccaaatggtacttcttatcatcatcacggtattccaaatcaaatttctttggtggttcacccaaggcaactgataccatgcgataaatttcgttcaagaattccttcttggtcttttctgcttcatccctcttgccttcattaactaatttacgcaaaacaagagcgtcttttctctccttacgagctaagttttcggctaaagcagtagtattattagtattaaagctttctggcattgcatatgaaggtaccacgccatactttttaactaaattaatggccatggtccaaaggccaccatcttcaccggcaaactcaagccatgcttgaacatgacgatcagttaaaggtttatctgccaaacgaataattgcattgtaaaaagcgttagcacgttcaatcttgtcccagaagaaattataagcttgtgagaacgtaaaatccttgaccttgttttccttgccaaagtagtggcgcaaaacattcaaagtagtgaattcccagcaacgaccagaatgcttctgatcagttacaccgccaatatcaagttcagttgaaaagacatggttaagtcgttctgatacgcggtcattaaatgaagcttcaagcaaaccactacgacgagcagcacgagaagctactttattctcaggattagaattaaagctttcagaaaagccttcaatttcttgttgtgaaataactgtcatgatatacctcgttaattcttatcttttaattttttattaatcttttcttatataatactattttctagcttttttgtcattaagaaaaagtcctagtttttgacaactagggcttttaataaaattaatgatcaattaaaggtttatacctgacaaaacttcttgcatcttgtctgctgagttaatcatcttagcatgctcagtatcggaaagcttagtttcaattaccttttcgatcccttcaccgttaataacggttggggtacctaagtaaagatcatgcttaataccgtattcaccattaatcggagctgaaagtggcaaacaaattgcacgattgtccaaaatagctgagacaatttgagtaagcatcattgcaacaccgtagaatgtagcacctttgttggcaatgatcttgccacctttcttacgcacatcggtctcaatttctgctagaacatcatcgttgatttctgagtaatcacggagtgccttaccagcaactgttgattcatcaaagttttcaaaactagtatcaccgtgttcaccaagaaccattgagttaaccttagcaactgggacattcaaacgctttgaaagttcaacacgaagacgcattgaatcaagtgaagtaccagtaccaattacacggttcttagggaaaccagacaacttttgggtcaaagtcgtcaaaatgtcaactgggtttgcggaaacaacaaagacaccattaaatcctgattcaactactggcttaacaatactttccaaaatcttaacgttcttgttaaccaagtcaagtctagtttcacctggcttacgaggaacaccagcagtgatcacacaaacgtcagcatctttagcatcactataatcggctgcaggatgaatattggtttgacccataaatggcgtaatatcttcaaggtccattgaatcaccaacaggacgatccttagctacatcaaaaattgctaattcatcaacaattgtattttgcaataagtcatttgcaaaagttgaaccaacagcaccatcaccaacaagaaatacttttctactcataagttaaattagtcctttcaaatgtttataaactgttttttatctacatgattaattatacactaagcgctttcattagacacgatttattccataattataaattataatatcccatcaaaatctcgccagtgttattatttctatcgaaaaagagcagttaaccaaccgctctctttacataatctttcttatattatttactttcacgaacatatttagccatctgaatacctgcttgacgaccaaaaataactgtttcggcaattgagttaccaccaattcgattatttccatgaagtccgccagatacttcaccagctgcaaataatccatcaattacattaccattagtatcaagtacttgagtttcagtattaatatgaataccacccatagtatagtgaattgctggatgaacatgaattgcaaagtatggaccacgatccagttcacgatccatcccagtcgttctgccaaattctttatccttaccagttgcaacggacttattccaagcggcaatggtcttttctaagttggcaccatttacgccaatttttttagctaaatcagccaaatcagtaccatgttctactaaaccaatctggtcataaaactcaactgcagcaaaatgagcccgtacacctgagtcaaaaatcaagtatgccccatcttcatgcaaattagtaattgcactagaaacaatctttcgtgtacttaattcattaacaaaacgttgaccattcttgttaactaagatagcaccttcaccgcgcagaccttcaccaattaaataaacatgcggattatcagtatctgcagttgggtgaacctgaatgaagttcatttgcattagttgagcatcaagtgcttcagcaagcttcagtccatcacctgtagcccctggctgattagtagtcttatagtcaactaagtctggacgatacttcttaatgatatccttggaagcaccaaagccaccagtagctaaaagaaccaccttagctttaactgttttaatgccatctggtgtctcaacttcaacaccattaacgcgcttcttagcatcttgcaacaacttggtaactttagcaccagtaaagatgtcaatacccgcttttttcacctgtgttgtcattcgtgaagttagataaaatccaactggttccattgaagcaggacggtgagcacgtttcttactcatccctcctgtaatggtcaaatcagttaaacgaataccatatttcatcaaccatgaaatagctaaagcagagtggttaacaaagtacttcaacatggcacggtcatttaataaacctccaccttttaaagtttcttcatagaagtcacggttattatcaatgatcccttcgtcaagctgaaccaaagattcagaagcgttcattccacttgaagcacgactagtgttaccaccagttttctcatttttttcaagcacaacaacatttagacctagttcatgagcttgaagtgcagcagtcagacctgctccgcctgagccaacaacgatagcatcatatttattctttaattcttttgtatttggcatttcttactttccctattcttctggagtagacttatcaacattagtcatttgcatatagtccatccattcatcatattgttcttcagtaactttaccactcttcaaagcagcttctcttaaagtagtgccttctttatcagcagtttgcgcaatcttagcagcagcatgataaccaatatgtggcgacaaggcagtaacggtcattaatgaattctcaagtaattcatccattctttcttcattaaccgttaagccatgaatcattttatcagcaaaaccagtaattgtaccagttaaaatatcacaactatctaagaatgatgcaatgatgactgtcttgaagacgttcatttcaaaattaccttgactagaagcaaaggtaatggtggtgtcattaccaaatactttagcagcagccattgtcacagcctctgcctgagttgggttaactttacctggcataatacttgaacctggctcatttgctggaatatttaattcatggtagcccgctctcggacctgaagcaagtaaacgaatatcttgcgcaatcttaaacatatcagcagccaatgttttaagggcaccatgaactacatcaagacctgaatggtgagctaagccccagaatttattagttttaacttcaaatttatgaccatagacttctgataatttaccagcaattttttcggtcattcccggtgctgcattcaagcccgtccctacagcagtcccaccaatagctaattcgtagagagttggcttcaattcacgaatatatgataagtcatgtttaagagcagaaatatagccagataattcttgaccaaaagtcaaaggcgttgcgtcttgtaagtgggttcgaccaactttaacagtcttccaatatttcttttctttaacaactaattcatcaattaagtgttgaattgctggttccaacttgtccaatgcttcaacggcaacaatattcattgcagttggataagtatcattagatgattgaccacggttaacatcatcattaggcaaaatatctaaacctgggtgcaatttattagccaagttagctacaacttcgttaacgttcatgttgctttgagtacctgaaccggtttgcaaaacatgaagtgggaagtccttacgcaagtcagtatcgcttaaagctagcaaatgatcaattgcatcttcaattgcttcgcctttttcttttggttcatcgccaacttcaacgttactttctgcagctgccttctttaagtgtaaaaatgctcgaataatttgcaatggcatcaattcaccacttgggaagttattgcggcttctttcagtttgagggccccataaagcatttttagggatcttaactggaccaatagtgtcactttcaacacggtattcttcttcgctcatattatattcctccttattaagctctataaggtttgcgttaattatcaatcaccatttataatacctgtaaaggctttctttttcaatttcattccaaaaaaagacccaggatttttcctggatcatagttttatctagactggtgattcattcttttagcaaagaagtcaccaatgatttgaacgataaaaatcaaaataattactaatacagtagctactaaagtaacatcattattgaatcggttataaccgtatgaaatagcggtattacctaaaccaccggcacctacagcaccagccattgcagtcaaaccaatcaaagaaataatcgtcaccgtcgaaacacgaatcagttctgagcgagattctcttaaataaacatcaaagataatatcacgcgcagttgagcccaaactttctgcggcttcaaccttacctgggtcaacactttctaaagcaacttgcacctgacgagcataaaatggaaatacgcctaaagttaatggtactaaggctgccttcattccgatctgtgtacctacaattttttgagtaactggtgcaacaaaggcaagcaggataatgaacggaatcgctctgaagattgaaactagcttatctgagaaattgtaccagaatttattgggccgaatcccgccatccttagttaaaactaaaatcacgccaaagataataccaagaatgccaccaaagatagctgaccaaaaagtcataaataaggtctgaaaaatactagtgccccagccagcgtctccgccccagccaagttgaacaacattgggtaaatatttacttaagaaactaatcatgatatacattccccttttcatctaaacgtgtaaatgtcacattttgcttagccaaaaattcttgtgtttgcttttgcttagctggatcgcctttcaccaataccaccaaagtaccaattggctcttcattcaaaagttcaacattcccataaagcattgaaacttctacgccaatttgcttatacaattcaataatgattgatttagtcacattagctacgctgtaaactaattgataaattgcttcatttttgccaagcttatcaagcgccaatgaattcaaagtagaaatcgcttcaagtgatccaccaacaaacttcttggttaaatcctgcttaggatgtaagaagacatctcgcaaactgccgtcttcaatcacattgccgtgttccatgacggcgaccttagtggcaatcttcttaacggcatccatttcgtgcgtgattaagatgaccgttaagtggaactttttgttcaaacgcttaagcaggtccaagatttgttgcgtattttgtgggtccaaggcactggttgcttcatcagagatcaaaatatctggattattagccaaagctctagcaatcgctactctttgttgttgcccaccagataattcagctggataaaagtcagccttatcttttaagtcaaccagatcaagcagttccaatgaccgtttttctaattcctcatcactcaacttttcatgttttaaggcaaaggctacattttctaatacagtcgtttcatttaataggttaaaaccctggaagatcattccgatgtttctgcgctttaattgcaattctttattagaaatcacctgcttgccatctttaacaaattcagtgccatcaacggtaatactaccggcagttggtttttgtaaaagattgaccgttctaactaaagttgacttaccggcaccagagaaacctacaattccataaatgtcgcctttttcaatggaaagagaaacattattcactgctttaactggttcgcccttcttctgagggaaggccacttctacattttttaattcaacaatactcatttttgatcctccttacttcaacttaacgtcccaggctgcaatttgcgtattgccatagtattccttagttagcttcttagtttctgcagtttggtaagccttgacgacatcttggtaaagcttgtccttttgttttccttgtttgacacaaagaatgttaatccattgttttgaatctttgttaattggttcaatgtaaatcgtttgcttatcagtcaagccagcaggaccagcataatcattatttactacagaagcgtcaactgaattcaatactcgactagtttgttcagcaccgatttccttaatcttgtagttatttggattgctggtgatatcagctacagtaactaaggtcttacccttcttcaacttaattaagccagcatttttcaaaacaaacagtgctcttgattcgttagtagcatcgttaggcactgcaatcgtggcaccatcaggtaagtcactcaatttatgatacttgcgtgaataaagtctgatcggtgcgatgtaggttctaccaatggcgacaacgccaccgtgatttgccttattccaatcctttaagaaggcatagtgttgaaaagcattcatgtcaatatcgcccgacttcaaggccttgttaggttggttgtaatccgtaaagttcttagtttttaaggtaataccatatttttccttagccgttttagcaattgacttccaaattgcggcttcggctttactttccccaacgattccgactgtaacagtttttgcctgattttgactgggaattcctggaccaaaactaaaccaacctgcaatcacgatcagtatcccaatgatcgtccaaataatggtatttcttcttctccgttttctcataaaatacactcctactttgataaaaataaaaaagcacccatcccaaaaggacgagtgctcgcgttaccacctttaattcgctgatcacttacgtaatcaacctcactggctatcaaaaaatagcctgcactgttaacggatgcagccccgccgatagctaaatatcaccaccggtcatcgttccaaacccatattcactagctcctatttgccaactttcaccaccacgctggctctctttatcaatagaagttctagttactcagtccttcaagatgttgttttcttgatttgttataaataagttatcatcttcttttaatctagtcaacatcttttttaatttttattagataaaagcgatttcattgtataattaggatatagttaaataatttatttttgctaaggagaaaaaatgaagaaaaatcgctttcgaagttttgctctctcattagctgcagcaattggattcatttcttttgctaatactaatgtcccatgcaacaatcaaaccgtctatgctgtttcagataaagcattagtcaatttgaaataccacaacaaagaaattgtgaccgttgatcatgatcaaccgcagttttctaagagtacactgagcaagaaaaaaggtccatggcaaaaatatggccaattagattatttgaaccgagctcatgctgctaatgctttactaaataaaagattaatgccacatagtcagcgtgcggctttaacttggaatccgaccggctggcataataaacgaatcgctagtggttggttgtataatcggtgccatctaatcggctatcagttgactggtcaaaacaacaatccacgcaatttgattaccggtacgcgtgaattaaatgatccggatatgcttaaatatgaaaatgaggttgctgaatatttacgtagttcgagcaaaaactatgtccgctatcgggttactccaatatttaaagggaatgacctattagctaacggcgttgaaatggaagccgaagcaactagcaaaaacgggcctcgctttaatgtctacatttttaatgagcaacctggtatgttgcttaattacaagaccggtacttctaaggttaaacataggtctagtactattgctgaacatgtaaaatctagaaaacgatccacttctcgagtaaccaagaaacgaaccattcaccatatcaaaggtactgtatccactgcagaacaccgagtcgttggcaatcgtcgcagtaagatctaccatgtaatgaatgggcaaaattatcatatgtcatcagctaatgcagtttacttcaacagtgaagctgccgcacaagctgctggatatcgaaaatcattaaggtagtaaaaaagtcagagcaaaactctggctttttcattatcttcttatttcacattatttttgccacgatcatatgcttccttgaattccacaaaagtcatgttctttcctttttgatcaaagacaaccaacacttcggcgattccatccaaaattttagataaccatctaaagatagtcactgccgcacagaataagaccgccaaaataaataatgatttgttattaagcattgtcaatgagaacaatcttggaaaaaagatagttgagccaataatacagataactgataagcccataacagcaagtctaaatttgtttattggtgccgaaatatgatacatcaccataaaaccaactaagactagcaacatagtcgctgtcgtgcctacctgaccatgatcaagtgagatagaggcccctgcaatgactaaaattgcaactgccagccaatctgttaagccccctggaattgcccgagctaaaacatttggcataaactttccacgaattcgcttgtggttgctttctaaggccaataaaaacgacggcaagccaattgtaaatgcagagatcaatgtgatctgggctggctgcagcggataattgattgtcataatcaaagagaagatggccatcaagaatgaaaaaatatttttcaccaagaacaagctggctgaacgttgaatgttattaactacttgcctgccttggttcaccactaacggcattttagcaaaattagaatcgagcaaaaccacttgtgaagcttgcactgcagcactattaccagaagccatagcgattgagcaatccgcctttttcatcgctaaaatatcgttaactccgtcaccagtcatggctacggtattaccttgattttgcaaagcaacgacaaactttcgcttttgatcaggcttaacccggccaaagacattatagttttgcacggcctgctcatattcaccatctttaatggtttgcgcatcgatatacttatctgccccattaattccagcttgcttagctactcgagcaacggttaccggattatccccagaaataaccttgatatcaacaccttgctggttaaaatattgaaaagttgacttggcttctttacgaattggattcgacaataaaatataaccgagaacttgtacattttcctttaaggcggaattatcttcagttaatacgccaggataattagccgcaatcaacacccggtagccttctgccgcatatttttcaaattcagtttgatattgcgcaaattgatcacgcaaaaccatttcaggcgcaccaattaaagttgtctgattgccaaaaattacaccagaatatttattgactgaggtaaaaggcaaaatgctatccgccgttttggttccatctttaaaataggcttgaatcgccttcatcgtcgcattatcagctggcatgtttttagcaaaatccgcaatgatgctacttaaatcaccagtaaaattcttgctactaacagctttttctacggccatcttcggttcggtaattgttcccgttttatctacacaaaggacatttactcgggctaaagtttcaacactcttcatatcgtgcagcattacttcttgtcgcgctaatcgcatagcagctagagctaaggcaatcgtagtcaataaatatagcccttctggaatcatcccaattaaagcagcttccatggaagtgatactacgcttgagtccaatattattcaaaaagaaactctgactaaatagggcaattcccaccggaataatgatgatgccgacccatttaaccagacgattgattgaacgcaccatttcagattgttcaacactgcccattgcctttgcttcgatcgttaatttagaaatatatgagtctttacccactttttctaagacggcataagccttaccggaaactacaaaagaacctgacattaattctgcgtctttagtcttagtgatttcatcagattcacctgtcaacaaggcttcattaacccgcagctcacctgagattacccgcgcatcagctggaatctggtcaccagtttgtaaaagaacgacatcatcttgaaccaatttttcgatgggaattttttcttcttgcccatcacgtaccgcgataatttccgtcgcattcatcacgtttaacttgcttaaaacttttttagcacgaagctcctgcacaataccgataatcgtgtttaaaacaatcactggtaaaaaagtcagatcgttccaggcaccaacaaacaccaatagcacagccaaaatagcaaaaatcaagttaaaataagtaaagacattttctcgaattatttgagtagctgttttggactggtcatcaatggcttgattaacctgtccattttgaattcttggatcaacttcagcttgagttaatcccgttatttgtttatctgtcataattttctgtcctatactgaaaatactttcatccattatagcgaaaaataaaaaagccacgcaactctgcgagactttttaacaattatttattttttctatgataagttaaaaaagtatagtcatacttgttcttttcatcatgatgatgctcttcgcgactaactaattcaaaatcatcatagttaatcgctggcatcactgtatcagttttaaaattagctttgatctctgttttttctaaaagatcaacttgatcaagtaacgccctaaagattgaaactccaccaattgcacagatttcttcagtctgatgttgacgaagatattcatttaattcagctaatgtggacacaatcttcacttgctcattacccgcatatttttgctttaattcttgacgatgagttaaaacaatatgttttctctctggtaacaagtgaggcaaactcgcaaaggtttttcgccccatgatgatcggatgacctatggtcttttccttaaaatgcttcaagtcagccggcagatgccaaggcaaatggccatcgatgccaataccatgctgctgatcttcagcccaaacaaaacttaacattgagacctcctaaactgcaaccggtgccttgatcgtgccatggtgctgataattcagcactttgatatctttcatttcaaagtcttcaatgtgctttttttcaggattaagccacaattcaggtgaatcatatggcgtccgactcagcaattcctttacttggctaaagtggttgcgataaatatgtgcatcccctaaagtatgtacaaattcacccacttttaagccggtttcacgcgcaatcatgttcaagagcagcgaatatgaagcaatattaaatggcacgcctaaaaacatatcaccacttctttgataaagctgcacgctaattttgccatcgactacataaaattgaaacatcacatggcatggtggcaaagcactagttggtatgtcttctggattccaagctgtcacaatcatgcgacgtgaatctggtgtttctttaatttgcttaattacattagcgatttgatctataaagccaccacttcttttttcccagtgacgccactgtgctccataaacatcacccaaattgccatatttttgtgcaaatgcagggtcatctaatattcgttgatcaaattttttcatttctgcttgataaacttgattaaattctggatcactttgactacgcaagccaaaatctgtcatatcagccccctgatattcagcactttcaatccaatttttaaaggcccattcatcccaaatatgattgttatgctctaacaaaaagcgaatattagtatcgccccgtaagaaccacaataattcacttttaattaaaccaaacggcactttcttagtcgttaaaagtggaaagccctgtgtcaaatcaaaacgcatttgggcaccaaaatatgatctagttccagtaccagttcgatcatccttgtcatgtccttcagtcataattttttctaacaaatccaaatatggttgttcaagaattgccattatcttcacctttcaaaaaacatttcttctaacataccatagatcttgtatgttggataatgaaaaaccatagatttagtatttcatacaaaaaataaaaaggtgaataatcaccttaattatttttcttaaattcacttttatgtctgactaagtagacaattgttgccacaatcaagactagtgccccagcgataactgaaattcttgtatcaggattgataaacataaaaatcacaatcagtattaacattgcaaaggcaaaataattcgagaatggatacaaaggcaacttgaatggatgatcttgcattgcacctttgttatgtcgtctaaatcttaattcagccagcaaaatcacaaaccacgggatcatccctggtaaaacagaggaactaaagacaatcacgaataagtcactggctgaatgattgaattgcgaagcaattacattcaaaacaaaaccaataaaaataccaccagaaatgcccataatggcccgatcgggtacaattcgcttagaaatatgcttaaaaataccaggagcttcatgatcatgtgacagtttaaacagcattctacttgaagaataaattcctgaattagctccagaaagagccgctgttaaaacaacgaagttaattattgaagcagccgcagtaatccctactttagcgaaagtcgttacaaatggtgaacctaggctgtctaatttatcccaaggataaatcgttacaatgacaaaaattgctccgacatagaaaattagaattctaaacaaaactgacttaacacttttaacgattgcctcttgtggattggctacttctccagcagaaatacctaataactcgattccttcatatgaaccaacaatgattgacattgaaaagaaaaatccttttattccaccagtaaagaaaccaccgtgagaccataaattgctaaagccagttggatgtcccccattaccaacgccaaagaaaataacaataaagcctaaaataatcattagaataattgttactactttgatcatggcaaaccaaaattctaatgaagcataggctttagcactagctaagttggccaaaagcagaaaggcaataatgatgatccccgaccacaatgctgaaatatttggccaccagtacttcaaatattcagttgccgcgactacttcggacattcctactacaatatattcaaagacattggcccacatcgctaaatagccggctaagggatgcacatattctgttgcataatcagcaaatgaacctgtaccaggattgatatagagcatctctcctagtgctcgcatcacaatgtataaaattaagccaacaaacatgtaggctaataatactgacggaccggtccacttaatagtagatgtagaccccataaacaaaccaacaccaatagcaccgccaagtgaaatcatctccatttggcctgctgtcatcgtccgtttgagctgaggagctttagattttttattcaattttcacaactccaataattaatctatcctaattaataacccgcaattattttactggttaaatcaccattttgtcaaggttcaaattaaaaatattaatatttgggagtcttttctctaattgatcttttattcctttattaaatgaatttcacgatcaaacatttgctgcatctttttattaaaattatgggcaataaagacaattgttgccttgctttttaatagcttttgcaaaatattcatagtcgcagtctgatcaattgcactagttccttcatcaatcaaaataatgtcactgtcatgaatcttagctcttgctaagacgattttttgacgttgtcctccggaatatccaagtcaattttttcatcgacacctgctttaaactttttaatatcggccgcaaaattaacttcatcaagcacttgagctacttgattattaagttgcttgttgaacattgtaatgttttctttaattgtacccggaaataggttcggctcttgtggaatatagcctattcttgacatattaggcttaattgtcaaaccttgactattttgaaattcaattttgcctgtgctaggtttaagttcacccaaaatcaatttaaataaagtagacttacctgcgcctgaatctcctgttaataagattttctcgccaggtttaactgcaatatcaggaaaagtaagcttttcaccattaggatactgcaaagccaaatcttttgttgaaaatgctactggtgtctcttcttggccagctttaactttttcaatcacagtagcatcaccatcaacttgtttcattaaatcctgtgacgatttcataaaacttaatgcctgaattgtttgttgtaagccgatcgaaatattagctgcaaagttttggacagacataattgcaccaaaaatcactaaattcttagtgatcaaaaaagccgtcaaagacaacaggattatttgtcctaccatgttacagatcccattcaaaataattaattgctgttgagcagccgtttgtttaacatgagcctgttctactttacttgaagttttttcacctacctgaaataacttagcaccagcaaaatatcttcttaattcttctaagccagagaaccatttagctaaaacatctagataatgcttattttgctcagaaacattattagttgcttgttccattttcttttgtactaatttaggtacaaagtaagaaacaatatcaatcactacactagtcaaaaagattgaccaattaattgtaagtagagccaccaatgccgcaacaaacattgagccatagaacggcacaattggataccaatcaaaataattttttctaatcatttctaaatcattagtcatccgattttgcacggccggtacttgatgattttgaccatctctaaagtaatgtgtagccaaacgagcgcgcacctttttattatattcttcttcctgcactcgaattacaaattggatataatagatcatcccttgagcagctaaatataaaatccccattaaagccgtcgcaagtaaaatcttcacccaagcacgatctttgatataagtcagccagtacatttgaatgtagcctgcaccaatagcagcgacacctgaaataactgataaaatattaatgtaaataaatcttaaataattagttttaataaagcctttgaaactcattcggcgtcacctcgattagtcaatttaatttgccgatcaaacattgaaactaattctgtagaataattgtgcgcaatcataattacagtacttggagtattcaataaattttgtaatacttgcttcgtcccagcactgtcaattgcactagtcccttcatcaatcaatagccaaggtgattgatgaatcaaagctctggctaacacaagcttctgcctttgtcctccagataaatttcctttatccaaatcaatttgactattaagtccagcagacatcttatccaaatccttggtaaaacctacttgatctaatacacctgaaatttgattatttaaagcactattaaacatcgtgatattattggcaattgtgtcaggaaacaaggtattatcttgagcaatatagcctaattcatcaagatcaaaatttaatttttgaccattatgatcaaaaaaaatgatctcaccttggctgggcgttaatttacctaaaattaatttaaataaagttgacttgccagttccactatcaccagtaagcaagattttttcaccttgcttaactgtaaaatctgggtaagataaatactcaccatttttgaattgtaaggccagatcttttacttctagcctgttaatcttcttaacttgatgctgatctggagctatttttactggagcttgaagattagtaatttccttattcaaatccttggtagatttaattaaattccattccgttacaaatgctgaaacaccattcattacagttgaactaaattgaatagtagtaattaccccaccaaaaacaatttgtccttgcaaatataagtaagcacataaaaccatcaagagcatttgtcccacaatattaactacaaaggtgatcatatctgcaatagcaatagttgctccttgatgaatagctgcttttttatattcgtctgcgctttggttaactgattcactaaatatattaaaactggcatatcttcgtaattcatccaggccactcatccactgggctaaagtgtttaagaacttttcatttttcttagtaacctttattgtggccgatgaagtcattttttcaaaagttttaggcaaaaataatgaaattgcagttaaaatcaccgtcattactactaaaagccagttaaatgaaaacaaaattccaattgagaaaagcacagacaacaagtacataaaaccgtttttgattggttttaaataattctgtgttagctgatcaagattggcaaccaattcattttgcactttagcagtttgggcaatttcatttttaaaaaagtagcgactaatttttacacgaatttgatgcaaataagattgtgattgctttccgtataagtaatctgaactagtaatcaaggctaatctaactagatcacagccaatagccaaacaaataaaaataataaagccaaataaattcattttctttagctggttaaaggccggggtcatcaaatattgcgaagcagcatcaacggtcgtaccaatgataaccattagaaaaattaaaatgaatttagctttattgaccttaaaaatccctttaatactcatttgtctcatctccaagcaaattaaaatattaaaaatatcttatttatgtttaatattaccgctatttttttaatattcaatcactttttactaagtggttaaaaaaataacttgaacggcaaaattattactatatctagctaattcattaggaaaaattgggaaaaaaatagactagaaactcattatcaagcttctagcccattagtttaattcaattattaacggtaattcttcaagaaatccatcatcttttgataagctgcatcatgatctgcatcatatgcatcgactacatcgactactttattatccttagtaataatacggtactcacgtaagtctttcttttcattagcaacaactgtaatctcacccttacctggggtagagaacaattctggattaagttcttcgttcaacttatctgataattgttggttaaatgcgattgtattcatttttgtttttatctcttttctaaaaaatccaacacagacattatatcattattagataacgttgatgaatttagttttattttttatcaaggagaactgtacctgcagaaggattatgatcaattgcaccaatgatggagcagtaacaccttcaatatagcacagcaatacttattccaaaaatatcaatttgttattttgccttattacttttacgtatagatttcacttaattaaatgcacaacaagcatggcaattcctaagaagacaaaaattaaggcaacaatcatactagttactgtgccggtaactaaacctaaaatgatcatgccaataattgaataaatattcatttgttatcccttcaattaaacaataacagcagtatttacttttattatgtagcatgaacactttaaaatacaattttaacgtattttaatttgctaactttcgatataacggcaatagctgcccaataccatctaagatgaagttttccatatctgcaacttgatcttgctttctaaaagcaaattttcctaataggaaactggattgagttgcttccttattaaatgaagtctgtttttcagcatctgttaaatactcatttaaggataaatgatcagcaaactccatttcgtttttatcccataagtaccaattattagttgtccgcccttttgcccaatcaggaagatcagttaataatttattgtattgttcaggattatcgccgcgcttttcactcttataatgctgaaacataagataaacctgcagctgcttattatccagcatcacgccgatgcatggacttttatcggctaaagcattcaaacgataagctgcccagtaatgatcgcgtaagttccaaccattggtccaactttcaacatgaactttagcaaatttatcttgtggtaatttttgataaacatttaagtttatttctttccaggtctgccaaatttctttaaaatctgtttttatttgcgctaattcatcttcagaatattgcgatttcaattttttaaaagaaaattcatcccgatcaaaaattgcatacatttcttcagttaattgcgtcattttacaaagcccttaccatatttacgctagtaacaccagttggatctggaatatcatcattggtctcgccttcattataaaaaccacgtttttcataaaatttaatcaatttcggtaaacaagttaaagatatagcttgacgattttgctttctgccctcttgcgctattgcttcaattaattttgtcgctacgccttgtttacggtattcaggcaagaccgctaagctcaagaccatttgatagcgatcatctttttgattaggatgattttcaaaatataattcatcttcaatatagcgtttattaaaagcaggaccaaaaatatgaccaatcacttttccatcttcttgtgcaactaaaaaagtatcaggataattctcaattctaccaatcatatcttgttcagtttgctttttagtcatcttaaatgcgtcagattccagttctactacttcatttaaatcatccattgttacggtgcgaatgatcataataagcatcctccttaggtttatctctaaaagtgaaaaagggttcaaaagtcatctagactcttgaaccctatattattactctctatttaattcttccactttaatttaagacgatcttgctcagtctttttttgaaaatacgtcttcaccttcggtacaacttcttcgccataaattctaatggcattcatcacatcttcatgcggcattgaagcaattggcaaatgaagatagaagcgagttaacccaagttcttccatgactttgatgatcttatttgcaactgtctcgctatcaccaacaaaaattgcaccattttctccgaccgattcaagatattgttcatatgtcatccctgtccattgcggtctttccgtactaatttgatcaactaacaatttggtaggatagaagtaatccttaattgctttgtctttatcatgatttaaccagccccaagagtgtgcagcaattggcatcttcgttaaatcattgccaactttttctgcaactcttctgtacaacttaattagtggtttaaagtgcaaaggatcaccgccaattatcgcataaacgattggcaaacctaactctgcagttcggatagtcgattctatgcttccgcctgtagctacagaaatagggattggctttttagtgcgcggataaattcctttatgatcaactctaggtgtaaactttccttttggcaaatcgagaatttcttctttgttcattttgagtagcatttctagtttttcaataaaaagttcatcgtaattttctaaatcataaccgaatagatcaaatgcctcagtaaatgatccacgtcctgccatgatttcaactcttcctggtgcgattgcatccattgttgcatattgttcataaactctaattggattaattgttggtagatttgtagtagcacttgaaagatggatttgcttagttttcgaagcagcagctgctaaaatgatttccggtgctgagacagcaaaatctttgcgatggtgttcaccgattgcaaatgcatcaatattcaatttgtctgcaagaatgatttcttctaataagtctctgattctttgatcatgactaattgcttttcctgttgtttctaatggtgtagtttcaccaaatgatgagatacctaattcaatattcatttttatcaactcctaaattatttaacttactttttgtaagtaaaataatagcagataatttttgaaaaagcaatatcttgaatatgtgagtaagtgtcaatgtttttgcggtagcctttaaaccattagtctaaccttaatttcttaaatatttatatgacttaaatttctgcttagcttgcttaaataactattgccagctacctgtgcggttaatgcgccatgctggatgcctaaatgaacttcatgacgcttctttaagctgtcacgggccgctgcttttaattcctgttcagtcaatacagttatttctgaatcttcaaactcgctgctaagccaaaattccagctctcgattcttgatgcagcttaagatcctaagcatgccttctgctccagattttgaccatttcttgccttgccccttaacacggtaggtatacttgcggtggttgctctcgcagcagccaatggctttagtcacagtcagttttcgtttcttaaacggcttaatatcgtcccaatgacgatcaatataattccttaggcgccccagataatcatgattgagctcggtattcaattcatcaattagtcggctttctgcagtggttaggatagttttaactttgtcatagctgtatttgtattccaaagcagaaatcagcttgccttgcaggtcaggcgcaaaatatagcctttctttgattttcttatttaggtgaaagacatccaagaaatgctcatgacgcttgcatagccctacaatgtcatcgaagtctgttttggcatatccagcaccgccatcggcgttgctaagaattacagtatcagaaagatcataagtattggccaggtactccttggcttcgttcagcgcatcaagtcggcttaaagaaacaaattccttggcattgattcgctttctgcgtttcttgcttatattgacaatgccttcacagacctgatagcgatgaaattccaaccggcttttagtgcctttgatcaccacgccatcgccttcaagatacaaaactgggacctttttcttagtgcctgcggcatcatatcttgaatctgcttcttggcccgctttaatatttttcccggccatttttaccaaattgcccacctgcatatggctaatattaaagccagacaggcaattgactgctagagcagtattgcgataagtggcaacgctgcttacttctaagatgtttttgactgctaaaatactgtagcgcttgtatttgtcaaagcccattaattcatccaagggataccttgcttgtttgcctgggcagacatatcttcttctgacatacctaacttcgccaaaagccatattgattgagcgctcattcttcttatcaatctgatagccctgtgctttaaccttggtaatcatttcatcatcaactttagctaaagccaaggccatgatttccttaatcaggtttaagaagaaacagattatttttctttcacgcttaatataattatcttcagactttataatatttgcgatttcagttacaattgaattcataaaagaccagcttctaatgtgttttttgttcttaacatcagactactggtctttttgtttgagctcaagtccaaattcaaaggacttgggcttttttaattatttattcaacttaccgtaaaaaattatacacttagaatatgtgatcctttacttagttgcagttcttctaccaacatatttgataaataaagccatgattaaaataactaaacataaaagaaaaatatatgcatgctgtgttccgattctggttaaatcagctgacttagtacctttttgactagaagcaacgattgctgaagtaattgaagttccgacagcaccggcaaattgttgagcagtatttagaatagcgttgccttgagtagtttcactctcatcaatcactgccaaagtatcagtcataacatctcccaatatcattcccattcctgccatgtaaatgatataaactatcaatataaaaatattattcatctgattaggtaatactgcaaaaaacaatgtttcaagcaacatcaaacttacaccaaataaaacaggtttgcgtgcaccataattatctagcaaccgaccaccaattggacccatgattgcaccagcaactcctgctggcaaaacaatcaagcctgctaaaaaagcagtattatgattaaccaattgaatgaaatttggcaataaaaatgcattgcccaaagatattagttgaatgcagaaaaaaccaataatatgacctgtaaaactatgatttttaaataattttagatccaaaattggcattttaattcgattagatctccaaattaacagagctaaagctaataaagcaatcaaaattggaatagcagttgcacccaattgtcctgttcctaagttgctaaagccaaccagcatcccaataaagaagattgcaattatgataaagctaaggcgatcaatcttaacttttttaacagcagatttttgttcaataccccagatgccttataacaatgaaataataatcaatggaattaaaaaccaaaagacccaacgccaattcaatgcctgtaggacgattccgccaaaggttggcccaagtgctggtgtgattccagtgatcatactgccgacacccatcatggtaccaactttacccttaggcacttgttccaaaataatattaaacattaatggtaaggcgattccagtaccaatgccttgaattactcttccgagcaatagcaccggaaaaattggtgcagtagcatcaactattaagccaagtaaaaacaaaaaattagcggttaaaaatagacttttagttttatatgaactttttaatgcagcagagattggcacgataattgaaactgcaagcaaataaattgaagtcatccattgcacaacattggttgaaacattaaaatcacgcatcaaggttggaaaagcaatattcattgaagtttcaactagaacgccagaaaatgacattaatcccgtggcaattactgctgcaaacacttttgatgatattctttcattatttggttccattttttcctccatttttgacaaattttaaaacttttagtgccgtatttatttcagcttgtgtaaaatgactacgaacttttcgatcatcttgacgcatataatcttttatcttgggaataaatgatttactcttagcagttaaagaaacatccttctgtcttttatcgaccgcattagtaacgcgtttaactaaatctcttttctccattctttgaatcatgattgtcaccgttgaacgctttaaatctagttccttttcaatttcatgttgtgaaacagtttgattttgatgattagaaataaaatctaaagttgtcatttgaacgccggtgatacccaaagtgttagcaaacgtctctcgttcacgatctatttgaacggaagattgcttaataaccttttttatcggttccatataggtcctccttttgttagatgtctaacatattttgcatttatatttgttagatatcaaacatattttttactaatttgagactttagttcaaagtaaatactagtaaatatctatttcatcatttgacgtaaaactcacatctaattctttgagactgtaaaatattttgtgtaaggatgaatgattccttaaatttatttctttaaacattagaaaaaggggttcctttctcgtatgattggtttgaacaaaaaaacacatacagaaagaagaactccttcatgaatgattttaccaaagattttgctcaagctctattcaatccagacaaaataaatgatttattgcgcaaagagctacaacaggctgttaataacttgttagaagctgaattgactgcctttctgggctatgatccctatgccagaaatggctggaatactggcaactctagaaatggtgcttatttccgcaaagttgatacgcaatttggcccaattgaagtgcaagtgcctcgggatcgcaacggtcaatttcatcagcacacgctgcctggctacaagcagcactcggatatcttggaaagcatgattatcaagctttactccaagggcgtgaccaccagggaaatagccgatctaattgaaaagatgtatggcagccattacagtccagctcaggtatcaaatatttccaagcagatgattccaaaggttgaggcttaccacaaacgcaagctaagcgacaagtttttctgcgtctatttggatgcgacataccttcctttgcgccgagaaacatttgagcgtgaagcagtctatattgccattggcatcaagcctaatgggcacaaggaggtcattgactactgcattgcacctagcgagaacattgaagtctggacagatatgcttcaaaacatgaaatcccgaggcttaaagcaagttgagctttttctttctgatggtgttgttggcatgaaaacagccttggccaggacttatcctaaagctcattttcaacgctgtttggttcatgtcatgcgcaatatctgcgctaaagtacgcgtcgacgatcgtgaaaagatcatgaacgaattcaaacaggtgcatcaacagacaaacaaagaagaagccacagctgtcctgcatgacttctataccaaatggggcaaggtttacagccatgttatcagaagcttgaaagacatagaaccagatctgctggtcttttataactatcccaagcagatcagagcttcaatttattcgactaacatgattgaatcatttaacaatgtgatcaagcgcaaagctaagcctaaggcagagtttccaactgaacagtcgcttgatgcttttattggcattcaggcaatgagctacaatgaccgttatttcaatcgaattcataaaggctttggtcaggttcaggacaccttagaatcctactttgattaaataaataattaaaaaatcaatttacgagaaagaactatttacacaaaagatttgacagtttcaattctttactaagaaaaggattttagttacatttgttgctaaaatagatttattatttctactcaaaataaggagttaatcataaatgaataaactaaacttcgaactactgcatatttttgatgttgttagtagatttgctagcttcagtcaagctagcaactatctctacctagaccaatctactgtcagtaaaaaaattagacagctagaagctattgtcaataagaaattatttattaggaatactaatggtattgtcctcactgctgctggacttgcttttaaaaataagtcagataaaatacttcaagatttaaaagaaataattgcgctaaagccaactataaccaccttacgagtcggggtatttgataatataagtgcctatctgatgcccgatatttttgctgaaaattttaatctatttaatgagggaaaattagatgcaatagttatcaatagcgacttctttactcaaattcaaggttctgcaattgagacgcaaattactaatgaatcttttgcaattctctttcgcaaaaataatgctctcattgcaagccaaaatagtatttcgttaaatgatttaaaaaataaaaatcgtaaatcaaaataactattataaaaaatatttattggtaatagttagctatgcataaagcgaatgaataaagattattaattagctattacgtttcttaatttggcgattttgtgttaacttgattgttatccaaataacaacgtatgaaagaataaaaataaacaatgtccaaatattgatagaccaattatttaacaacatcattattgagaataagctaaaagttccaattaacataaaaagtcttcctttccgaattcactatttaaataagtggttaaattcaaaatacaggatgctaaaatttaaaatcctaaaaattaatatctgtaagctaaatatttaagttattgaactgagtttgctatatttaagttaaaagataataaaaggaggaatttcatgaaagttacttttaaaggaaaagaagttgaattaattggcacaccacctaaggttggcgatgaaatgcctaactttacagttttagacaaaaataagcaagaagttactaaagataatttgttaggtaaaaatactttaatcagcgttgtgccagacatcaacacttccgtttgcagtattcaaactaagacttttaacaaaacaatggatcagtttcctgacgttaactttttaactatttcaactaataccatcaaagaccaacaaaattggtgtgcggctgaaggtgttaaaaatatgcaattaatgtctgatgaaaaattatcttttggtaaagctactggcttactaataccagaatctggaatactagcacgcagtgtgtggattcttgagcctaacggtaaaatcgtttatcgtgaaattgttgatgaaattactcatgagcccgattataatactgctgtaaatgaattaaaaaagttgctgtaaaatttaaaaaagattgcctcagtacatacacatatgctaaggtaatcttttttttctacccaaagtcaagtattatcaatgatttaagaaaataaatttacttgttttaatgatgcgaataaggttaaagcaaataagagtttaaatttaagaaaaagcgaaagtaccacaaataagcctatgaatacttgtagtttttccataggttgcttatacttaagttgattatttgatttcagctaaagtcttttattttcggtggctatgttgtaatcatataattgatcatgtttgataagagcaaacattgtgcgtatcagtttatggactgatgcaatggcgattttcttatagccttgtctatttgaagatcgttttttcttgtcataataatcagttatatggcaaggctgcgtagcctttaccgtctccatttgagtaataactcgataaagtatttttctggcaatatgattgccatgcttggtaatgccaagagaactgtctttttcaccagattggtaccttcctggatcaatgccaacaaacgcatcaatttgagctgaagtgctaaaccgtcttagatcaccgagctctgctactaatctcactgctgcaattctagcaacccctgggatactcaaatagatggataaagcacgagcgtttactgctttagccagcttttccatgtagttaattacatagtcgcgttcttgctggagtgaaaataaattagaaatgttcctttgaatagctctaacgataatactatctttggaatcataaggataagcttctctagcaaaagcgtataatcttgtggttaagtaccgtgccctttgttgtcctattccagaaatagaattaagcatttgagttacctgtgtctcattcttttctagaacatatccagcatgtgggaaaagactaacaagcgcccaataaattctgccagatggatgagacagtatttcttcaatttgtgggaaagtggattggaggttgcggtgcaattgatttttagtagtaactatactcctagtaagttcttcataatagcgactggcattctgaagttcatgatactctctgggctgtggatcacgcagcttttgcggggcattaaattgaattaaagccaggcgataagcatctaccttatcagttttattatggcgtaaattattgtccattagctttttcgctttaagcggattaagcttcaaatacttaatatgataatcctctaagaaagcttgcaggcttagagaataaacaccagtagcttcgaaaacaactaaaggagttatcaaatattggttcagttgctcataaagtttttgatagccaaaggaatcattagagattctaaaagattcgccttgtttgatccggtcattaaccacacaaactgtggaagatttactgctaacatcaataccgaaaataatttgtgattccataatataacctccgctgtgaagataaacctctttatcaacctattaattctaattttctaaacacggcatctaagtgcccacagacttcgaagagacttaagaataggtggtaaagcagtccgtttcttttacgacatcaagtgtctaaaaagctgaagacttgatttgctttatcttcactttctattttagacaaaataaaaagtgccagatcgtgaatccgtcgattcatgatccaacactaggttagtatgtttctttagttcttatattgttccattctttgattaagttcttccttattaaaattatctaaattaattgcttttccacccattaaccaatcaatcatttcaggatctactttatctttaggcgtatcgtaataatcttgcaaagaccatacaccaccaatgtcatcaattattccataaccttttccagaaagtatctttggacacttaggagctgcttgatcagtagtgatgttcttaatatctacttcgaattcccagctatcgccataatcataagttaataataatttatctctcttttcaaaatacgaaaccttagctttttcataatctatgcctgtagccggatcccaatctttcgcttcagcgatactttctgcattttcaaagcgttcctgcgtttttttattcagcaaatcaaacatatgtccaaaatctgcattaaacatatctagcatagcaacttctaatgttttcactgacgtattgccactaataataaatctacgccaagtagatggtttaaaagactttagttttactctaatttcataggtagctcgattgcgagtttgattttcaaaaattgtcttttttcgtgttttctgctttttatcatgactctcaagatcttttcgcaagccttctaaaattctagacaaatcctgagaagacagatctaaatcttcaagttccaaaatctttttaggatttgcttcaattgccgctatcatatcgtttatcaaatcctcatccaggccttgatcggagtatgaattaatttcttcaactacccagtcaatattcatccctatttctttactatcagttttacgaataagacctactctactcaaaaatacatagaaatttttcaaagtatttgtaatctgctctatttctagcggatgtagtttattgttagatatcataatccataaataagaaatcgcttctcctaaatcattagtaactaaatggatcttattacgtaataaataatgatttagataatccggcagcatttgatcaggttggatatatcctattcctgctggtacatatttagcatattgatcaatgagtttttgattattttctttaattttagcaacaatcttttcattgccttttactggtttattttcatatttttcaaaattagagaaatcttcaaattttggcactaagtcaacatacttatatcttcgatttggtttttgcggcttaatagggaaatacgtactaacctcatcaatcatcttagaaataaaattttgtccaatctgactatccaaggcaaaaatagtcgctgacattacagttagcttatctacgatattcttttcatcttttacaacatcaatcaaatttaaatattcgctttgattatcctctataagtttacgaattttttctagcattaaactagcttggcttttagtatcgtaaaaagacatttgcttggactttaccgctgaaactaatttttgttgctgtttaaacaaaataaagtcatagcttttaatcgcattagcaaaaacatcattaaacagtttggtatcaagtttagttaataaaattggaaaactagtgtctttttcaactaataaatagtacttttgcttttgaatatttattacatctgcatcccaaacagtaaaaggctcattcttaataatatcaatcttattttctttaatttctggtgctaagttaataccgtatcgtactggaagcatgtggttctccttattaaaataatttcattttaattttatcatgtctattcacaactattcatctcagaagcaaaaaaatgaaggcaatcactgccttcatctaaaatacacaaattttagtcttcttctaaaaccggtactgtctttttatttctaacatgatatacaactaaaccaattgctaaacctaccagtgctggcactaaccatgataagcccatgctggcaagtggcaaatgatttctaagtgaagccactgctaaaccaaatgaactttgactaaccacacttgggaaagcaactaccatatcgcctaaagctggtacaacagtaaataggattacgaaaaagtaaactacacctgccttattaaacaatggtgaacaaactgatagcaagatcaaaaccatggataaaggatataagaacattaacattggtgttgaccatgaaatgatttgatccaaaccaaagttagcggctaagaatgatgccaagcaactaagtgctaaccaaacgtggtaacttaccttaggaaaatgcttatgaaagtcttgcgcaaaagcagcaaccaaaccaactgcagtagtcaaacaggtaactgtcaataagaatgcaagtaaagcttgaccaaagacaccgccataaacgttaacgatttggttaaaggctaccccaccgttatcagaaactgcaaagcgtccgagtgacattgcacccattaagatcaataacaagtagataaaaccgatttctaaaacggccaagacacctgatttagcaacaacttttgaaacacttttagcatctttttgtcccatgccgcgaacagctgtaacaaccgtgaccccaaaggctaagcctgctaaggcatccattgtgttataaccttctaagaagccatttactaatgctccatgcttataagctgcagttactgctgcagtttgtggattacccaacggacgagcaaaagctacaagaaacactaggaataataatgctaagaataatgggtttaataccttaccaacgttagacaagatattattttgatgataagaaaaagcaaaagcagctaaaaagaataaagctgaaaaaacaagtaaagcggaactttgcatattcttcggcataaatggtgcaataccaactgtgaaagaaacggttgcagttcttggggtaccaaacaatggtccgattgtggcatggattaaaaccataaatactactgcaaatccggcacccagcggcttaccgatgtcgtatactccgtctgcatgagtaattgctactgctaatacagagaataatggtaataaaacccctgtgatcaaaaagccaactgcagctgttccccaatttgctccagctagttgtcctaaatgtaatggaaagattaggttaccagccccaaaaaataatccaaacagcaaggaagcaacaacgagataatttttccatgtaagttttttcgatgtatgatctgtcattttctctcctccaaaacatccctgataaacaaaaaaggccctcagctgcaaattgtaactgagggacgctttgagcgtggtaccaccctttatttatatcactattgctagcaatacctttcacgtacagtcaactacttgacgatacgtaggcactataatgggtgctcccactacttcttactttaagttaagaaatagaactcgaaagtgattttcatttaaacttaggatttatctcctcacacctaacgagactcgctgtaaattaagtctaaattactcttctttctctttgttttcagatttattaaatttgttaataactattttaatcaaaatataatcgttgtcaacaacttttttatttatttttcaaattttctattcaaattgagtctgccaattaggatcattatttgccgcaaaacacatggtaatttgttcctcagtatttcgcccaagtgaaagcttcggtaaattatctaatgcaaaataatcacaggcatcagtttcatcgttcggcttaaattcaccactaatttctttgcataagtaaaataccttcgtaatgttggtggccaaaattggtttattatgatgattacgatcttgaactgcaataattttgacgggtctaactactctacctgcttcttcatatgcctctttaacacaattttgtgctgtagtttggtcataatcattccagccgcctggcaatgaccattcctgagtcattttttcacggacaagcaaaattttattatccttaaaaattgctgctcgcgtatcaatcttaggtgtttgatagccctcatcacccaaaaagagtgttttaatttgttctttaggtagtcctgtcctagctgccatcatttcgcctgcaattttacggattttttcatagcgctcacgatcaaatacatcatgaccataatgcaaccctgcttgagctaaactttgtaaatctgtcgcccacttgataaattgatcatctgaattcatttttattgcctttaatataaaattctaagaaaaataacaaattccaaattaataggtaaattgaaatacctattttagattttatcacaacccataagtaacttactcctagtgcaaaaattagtagcaatgttaacagattacgaatactaaatcgacattcactcttgttatatacttgatttatagctaatgagaaataatataaggccattgaaaaaataatcaggaaaaacaaaaaagttttatttatgtcatgcacttgtaaatacagtattgctactgttgacaaaagtattgctactacaattgcaatatgactatacattaaaacaaagcctttacttatctgatgatggtcaattaatttatctgataaaactacatagcttgcaaacatcaatactaaagataaaaacaaaaaagcagcataaactaaaggtgtcttactattgaaataacttgtcaaattaacgatagcctcaccaaaggcaataattacgattaaacttactctctctaccaaatgagggaaatttactcgttcagttttaaacatcccttttaaaaacaatggcaaaataaaaccaacaatataaccacttatacaaaaataaattccaacagggtagccgatgattaatcctacaataattaagataaattctattcctaaaatgattaaaaaggcttgtttatcattattatctgcttttacaaatagatactgacaaaataaaattaagatcataacagccattgcaatattaaaatagtgaaaagtaacttgccattcagtattaatattgttagccagataaactgctacaaacatatttaaacctaaaccgccaatatctaaaaattgatttttgctatatcggttaaaatagataacttgataaagccaaatttgcattactacaattacaaccaataaaaattgaagaaaagtaactaaaggaatactgccattaacaggatgatgaatcattgcagtaattcgagaaattgcgtatacaaaaactaaatcatagaataattcaaacattcccacaggcttagcgattatttttttcatactattcgagactgtaaaatagtttgtgtaaggatgaatgattccttaaatttatttctttaaacattagaaaaaggagttcctttctcgtatgattggtttgaacaaaaaaaacacatacagaaagaagaactccttcatgaatgattttaccaaagattttgctcaagctctattcaatccagacaaaataaatgatttattgcgcaaagaactacaacaggctgttaataacttgctagaagctgaattgactgcctttctgggctatgatccctatgccagaaatggctggaatactggcaactctagaaatggtgcttatttccgcaaagttgatacgcaatttggcccaattgaagtgcaagtgcctcgggatcgcaacggtcaatttcatcagcacacgctgcctgactacaagcagcactcggatatcttggaaagcatgattatcaagctttactccaagggcgtgaccaccagggaaatagccgatctaattgaaaagatgtatggcagccattacagtccagctcaggtatcaaatatttccaagcagatgattccaaaggttgaggcttaccacaaacgcaagctaagcgacaagtttttctgcgtctatttggatgcgacataccttcctttgcgccgagaaacgtttgagcgtgaagcagtctatattgccattggcattaaacctaatggacataaggaagtcattgactactgcattgctcctagtgagaacattgaagtctggacagagatgcttcaaaacatgaagtccagaggcttgaagcaagttgaactctttctttctgatggtgttgttggcatgaaaacagccttggccaggacttatcctaaagctcattttcaacgctgtttggttcatgtcatgcgcaatatctgcgctaaagtacgcgtcgacgatcgtgaaaagatcatgaacgaattcaaacaggtgcatcaacagacaaacaaagaagaagccacagctgtcctgcatgacttctataccaaatggggcaaggtttacagccatgttatcagaagcttgaaagacatagaaccagatctgctggtcttttataactatcccaagcagatcagagcttcaatttattcgactaacatgattgaatcatttaacaatgtgatcaagcgcaaagctaagcctaaggcagagtttccaactgaacagtcgcttgatgcttttattggtattcaggcaatgagctacaatgaccgttatttcaatcgaattcataaaggctttggtcaggttcaggacaccttagaatcctactttgattaaataaataattaaaaaatcaatttacgagaaagaactatttacacaaaagatttgacagtttctactattccctcctaatatttgattgctgtttatcatactttatatttgtccaaaaagcaaaatatgatattaatttataagaatcagtttttagcttgattgtgaaaaattatgctaaagtaattattgattaataaattaatttaattggaggaatagccatgccacgaaatcccagaagacacaattttaatcaattctcagaccaagaaaaagataaattaaaaaatgtcaaaaaagaattagctgaggcccaaaagaaagagcctgaaagtctacaagcctttaacgatggagtgatggccattattattacaattattgttttagaaattcaacctgctctgcatgaaattcattatcagcaattcattagcaatattgctgtctttttaatcactttttttattgtggcagatttctggtatgatctacatttatctttttcatactatattttcaagccttcaaaagcgattgctattctagacttcttttttttagctgatttatcacttctgccagtcatgactaaatggattatggctgaaaattcttctttcgctgtagctaacttgggaattgtttttttaattgccaaaatcttagaatatctaattccctgaattgtcaaattaagtgcaacagttaggctatgaggaaatatattgcttgaagagtttttctgctgtgtgatattgaaggattcgacgatgtttgcggttaatggcatcagttgcctgttgaacataagcagctgacttatctttcatgcttttgcctttagggaagaattgacgcagaagtccattgcagttctcattggtgcctctttcccatggagaatatgggtgggcgaagtagatctggcagcctttgatctcggtcatatccgcaaactcagagccattgtcaaacgtgatcgatttaaaccaggcaggatgtctgtcaatctcattttgaagcagcctttggcatgtgcttgcccgatagtcaggaatcttgataactacttcaaagcgtgtggttctttcggtcaaagtcattaaagcaggctgattcttgcgtctgacgcctttaaccagatctccttcccagtgcagcggcgtttttctgtcttcaatctctttaggacgctgttcaatggaattgccaagattcttcttgtgcaaagcatgaccgctatggccgtgatgacgcttgttcctgcgtcttttgagcttcataggcagatcaatattgcttatgtccagcaagccctgatcaatatagcgatagacagttggagggtagcctggcatagtccttttgaattcaccaacgaattcatcgatgctggtggcatcaaatttagctttaaagcgtctggagagcattctcaaaaagacagcataatgcttcaatggattgcgctgatagcagtttttgcgacgcttctcataataaatctgtgcagtatcagcgtaatagtgctcatacaataaatagctgctgtctctttgcaggacgcttccgcgtttgatttcgcgactgattgtcgacttatggcagccaacttcttgagcgataacagtacgggaagttatgccggaatccagcattgcttgaatttgtccacgttgtacgctggttaattgatgatagtgcttagaaatgctagaatttgaattggtcatgaagatcttcctttcttgatttttcgtcacttcaagtttaggtcttcatggcctttttgtttaacacttagtgttgcacttcaattttaaatccgggaaaatagtttagaataatattgactttattaaatttattatgtaatatacttactaaataaatggtatgaataaccactaagaataggaaattagctttaccttaactagtcagcgaacccaaattagtgtgagtggggatagaaaagtaaagtgaaagtagcctaggagtgcttgaagtgagagtaattgtaactttaggagggcgcgcccgttatagcgtcaacgtatctagttttgctatgtatggggtaagggaataatagtaatattattctaaaataaggtggtaacacgcgtgatagcgtccttataagctttatgcttataaggacgtttttttgtacctagtattaatataatttttatcgaaaggaatattaaaatgaaaaccaaaaaagcgagtattaggcggtcaatgattatcgcatcacttattttcggaatgttgtttggagcgggaaatcttatttttccagttcatttaggtcaattagcaggtagtaattggctaatagcgagtagtggctttctgctttctggtgttttactgccattaatggcgctgttggcaattagtattaccaagtcgaatgggatctatgatcttgcattgccgaatggtcgttactatgcacttatctttttaattcttgttcacgctactttgggaccactatttgcaactccccggacagccactgttccttatgaaattggaattgccccttatttatctaagtcaactaatactttgggattattaatctactcagcaattttctttagtttagtttatcttttttcaaatcatgagggaaagatcactactttaatcggtaaagttttaaatcccttgttcttgttattattattccttatcttcttattagcattcattaatccattgggttctagaaatactgctgctataactgcttcatatgcaaggcatgctttttccaatggctttttgcaaggttacaatactatggatggcttggcagcattagcctttggaattactattattactgcaattagagaattaggtattaagaagacacggcaaatttcacttgcaacggctaagagtggttttctcggaattgcgggagttgcaattatctatttagctttaatttggctaggcgcgactagtttgcatcaatttaaattagcagcaaatggtggaattactcttgctcagatttcacaccattacttaggaactgctggagatgcaattttagcaactttagcaactatcacttgtatgacttcagcaatgggattagtaattgccttctcgcaagatttccatcgccgttttcctaaaatttcgtatcgaacatttttacgaatcaattgtggattatcatttctatttgctaatttaggactcaaccagattattgcatggtcaacgccaattctgatgttcctctatccgttagcaattaccttaattattttagggctactttcaccactgtttaagaatgaccggctcgtttaccggattacaactgagcttaccttaattccagcattctttgacatgttaaatgcgttaccagctgggttacatgaaagtcgattattacagacactgcttggttttgcccaacaatacttcccatttttcaatttaggctttgggtggctgacctttgggattgcaggattaattcttggattgatttgtcatgtattaagagtaagaaagcgtctaggactaattagtgaataatatgtattcatcggtcgtaaaattaaatacattaaaaaaaggattaactttgctcatactgtaacttaaggtgcagtatgagcaatttattagaaattatatagatgcaatttatgaatgggattgaatattaatggaaagcctaataagataaactcaacttatcagcaaatgacaggtgtaagagagctttatatgaaaaagcatgttcaagtcctaaatattattggtgatggtgacagtacttataaagttgaaaagattaatggcaaaaatgcacaacattcaaaactgcatgaaaatgctcaagttgatcaagcattaattaagtttttatggaataaatagagttacttaatatatctattgtaaaagaataaaacaggtgctattattacagcataatattattcaatgaaagaagggtttaggttgcgcttttaatcttgtaattagcatcatagtccaaatagtaatttatattatggagagactatgtacttttagcaggattaaagcccaggccttcgattattacaattcattttcgtaaggagagagtctatgcttgctagaagtatgggctctttttgtgcgaggtggttggatgagtaatcttaagattagtaggttatcttttgaatatgaagacagcaatagatatatttttaaaaatcttaacctagaccttgatactgattggaaactaggtttgattggtcgaaacggaagaggtaaaactacttttttaaacttactgcgaggtaagtattgtggaactggtcaaattcaaggtaatgctagcttttcatattatcctgtaaaaattcaaaattctaaaaacattactttttatgagttacaagatcaggttgcctttgaacaatggaagctggaacgagagttaactctaatgaatttagatcccgatttattatggcagcctttcaataccttgagtggtggtgagcaaactaaaattttgctagctttatcatttacagatcaagattcttttcctctaattgatgaaccaactaatcatctagatgagacaagtcgtaaacaagtagcagaatatttaaatgggcatgatcaaggatatattgtagtcagtcatgatcgagattttttgaatcaggtaactgatcatatattagcgattgaaaatacagcgattcatttgtatcaaggaaattattcgacttatgaggtaactaaaaaaaggcgagatgattttgatcgtgaaaaaaataaaaagcttacagggcaagtgaaaaaattgaaccaagaaaaggtacaattccataattgggcagctaaaatagaggcacgtaagaaattagggatgaaaacacagcatattatcaatcgtcgaaccagattaaataagggagcgatcggacatcaagctgcaaagatgatgaagaagtcgattaatgcacgcaatcgcatggataagaggattgcggaaaaagaaggaatgctaaagaatattgaaaaagttcctactctgactatgaattttcaggcagattatcatcgtgagattttgcaacttaatgatcttagcttgcaactaaaaaatagtagagaactatttaaaagcttgactttgtctttgaataatcatgaaattattgctattgaaggtaaaaatggttctggaaagtcaacattaattaagcatttactgggtatctctcaaaatctaattgccaaaggtaattatgagctaattgaaagtttgaaaatctcttatttaccacaagaatttgtaatgtatagcggatcattaaaagactttgctaaaaaatatcatttgtcttatgaagctttgttgagcaatcttaagaaaatgggatttgcgcgtgctgattttacaactagaattgaaaaaatgagtatgggacaacagaaacgagtagctttggctaagtcattgacagaacctgctaatttatatttatgggatgagccagcaaattatttagatgtattcaatcaagatcaattaattaagcttcttaagagtgtgaagccaacgatgttactaattgagcatgatccttacttcattacatcggtagctgatcagcagattaaattaacaaattaactagatatttctataaaataatcttattaggaaaagtaaaattataagatatattggttggaaagttcgattatcataggcataataatatagagatgataaacatgaaaaatgaattttgtcacgatgaaatgaaatgtcagaaaaattgtccttgtgcagataaggatggcatttgccactgcaaaatggtaaatagtaaagaatgtgtttgcaagagtcattgtaaggaacaagaaaagtaacaaaagagcgccagtagatttagtttaagtttactggcgctcttttaaataaaaatcacataattttgttgcgtttaactggaaaaagaaatgaaataactggaactattagataaagaatcattgctagttttgcattgaataatgacagaatgatcaatattacatttaaaaataaagtaaccgtcatttttctaataaaggagcggctaataataatccgcatgatttgggaatagcgcgcagtatttttagcaccaaaatattgaattagatattccccggatttaaaattgaagtgcaacactaagtgttaaacaaaaaggccatgaagacctaaacttgaagtgacgaaaaatcaagaaaggaagatcttcatgaccaattcaaattctagcatttctaagcactatcatcaattaaccagcgtacaacgtggacaaattcaagcaatgctggattccggcataacttcccgtactgttatcgctcaagaagttggctgccataagtcgacaatcagtcgcgaaatcaaacgcggaagcgtcctgcaaagagacagcagctatttattgtatgagcactattacgctgatactgcacagatttattatgagaagcgtcgcaaaaactgctatcagcgcaatccattgaagcattatgctgtctttttgagaatgctctccagacgctttaaagctaaatttgatgccaccagcatcgatgaattcgttggtgaattcaaaaggactatgccaggctaccctccaactgtctatcgctatattgatcagggcttgctggacataagcaatattgatctgcctatgaagctcaaaagacgcaggaacaagcgtcatcacggccatagcggtcatgctttgcacaagaagaatcttggcaattccattgaacagcgtcctaaagagattgaagacagaaaaacgccgctgcactgggaaggagatctggttaaaggcgtcagacgcaagaatcagcctgctttaatgactttgaccgaaagaaccacacgctttgaagtagttatcaagattcctgactatcgggcaagcacatgccaaaggctgcttcaaaatgagattgacagacatcctgcctggtttaaatcgatcacgtttgacaatggctctgagtttgcggatatgaccgagatcaaaggctgccagatctacttcgcccacccatattctccatgggaaagaggcaccaatgagaactgcaatggacttctgcgtcaattcttccctaaaggcaaaagcatgaaagataagtcagctgcttatgttcaacaggcaactgatgccattaaccgcaaacatcgtcgaatccttcaatatcacacagcagaaaaactcttcaagcaatatatttcctcatagcctaactgttgcacttaatttgacaattcaggttctaaactatttttaattttatacttttcgttttgacatcaattggtttcgaatgtatctgcgaaatgcttcatcaccaagtttttgacgcttttcatataattctttggtaatcttaccagtaacataacacatccgatcacgatccttatcagtgacagccttaaagatatcttgagccacttcctcaggcgattctaaactatctgtgtctggcattaacatttttgtttgattttttagtaactgatcaaatcccggcattgcgaatgtctccatcttaaaaccggttttcacaacccctggaacaatgattttcacctgaatgccaaatggcgctaactcatgataaagcatttcacatactccagtcaccgcccacttatctgctgcataaataccatctagagctaatcccatttctccagcaagggaagtagtagtcaaaattaacccacttttcttttttttgaaatatgggataaatttttgggtgacacagatcattcccagcaggttcgtgtttaaggactgctgcatggcttcttcggtcatgtcctcaaagcgagacttcatcccataaccagcattattgaacaaaacatccacctcatgctttttaagaacttccgagactgtctgagaaatttgttcaggcttcgttacatcaagtggataaataaaaacattttgataggatgttaattcggtctctttttcaggtgaacgcatagtagcaatcaccgttcaccctttttctgcaaataattttgctgttgctttgccaattccggatgacgaaccaacgataaaaattgtactcatattcactacactccttatcttaagatggacgattaaattattcactgacgataattaatgacttgattgcttcacgtttatccatcacttcatatgcctgttgaattttgtcaagactaaaacgcttagtaaagacttttcctggatgaattttaccttttaatacagcatcaagaagaatcgcacgatcataagtagtgacggaagcaattcctccgcgaagaccaatgttcttccagaaaagcgtgtttgatgatggttcggtttgtggaacacctactcgaccaacaattgcgcctggacgagctaacttgccagcttgttcaatagcagatacggccccaacacattcaagaaccttcttaactgcatcatcaccacgtaatttagcaccgattacaccacaaaggccaacagcaccatccccgataactgcgaccgtatcgtcttccttggcttcagcacttgcagccgcatggtaaccagttgccatcacatcagctaaagttaaaagatcgtttaattgctcgtccgtgtaatctgaggggtgacctggaatctttactaatgcccagttagcattagtaaaacgaagatattcaccttggtaaccaccattactgccagcttcttggttaacacagttgccatcgaaaccagctaaacaagctacgcagtgaccacaaccatgagtaaatggtgcaattacaaaatcaccaggcttaatatctttaacgttatcgccaacttcttcaacaattgcaattgcttcgtgtccaactaatgatcctttttcacgattagtaatcccacgataccaccataagtcggacccacatacacaagcacgaacaatctttaaaatcgcatctgttggcttttggattattggcttttcaacctcatgaacttccatcttaccagattccataaatacagctgctttcatctaaattcgctcctctaattatttttacattgtattaactcaaactgtaaaccttaaagtccactacaaggcaagtaaaaatttaactcggcttattaatgccaatactttcgcaggaataaagctcatcatcgttaagtaattttgtaaccaaatcaacgattgattttattgaaacatcgggaccaccaaatggttcgcccttatgagtaatttcataattaactggaccaccagtaaaccagccgggacgaataacggtatagtttaaattagacgcttccacgatgtcagcagcgtcccgatatgattgaagaattgggttgctttccaaattactactaataccaattgaagcaggaatctcattataaattcccatcgaactaataaatatcaatcgtgatatgttattacggtccctcgccgcaacaatctgcttagcataggcaactaagtcaccgcttaatgctgcaaacaccgcatcctgtcctaccaacgctttgtctaaatcgtgatcatttaatacatccccactgattacagtttctcgttgaggatcaataacattaattcgattggctgaccgcgcaaataatgttaagtgattgtccgtttcatttaatactgtttgagtggttgtagtccccaatgctcctgttgctccaataattaaaatattcttcataacatttgacctcctttaataagtgctggcgatctgcttagtgatcgcccatttaccgttaatcttcgcaaattccatcttcatttgaagcaacaatgtacttactgggcttccccaaacgctagctttaactttattgtgaccaattaagctagcgtgattcccagcaatctgaatgtctgagatctgctcctcatcagaagaataatacttaagctcaccattttggatttgatcgatccattctagtttgggctgagcatacccagtcatgtggtgtaataccatggttgaatctaaaatctgacccaaggtttcaatgtctttatctacgattgcccgattttcctggcggtaaaggtcaataattacctctttatctgtcatcaaatcgtcctttgctaataactgttccatcaaagccttatcaaaaccagtttttctctttttgctttgattaattgtctatatcataacgatcttcaataactaaaccaattcacatttacaattaataatcataagtaaaacttatcaagctaaattcttatatacaaaaaaacgccaaaaattagtgaagaagcttctttttgacgtttatttttacctcatagtctatttcttaaaattgtttctttaatagctcagcaaacttttcaatgtaaaagcctgaattatcttgtttccaatatgtatagtaattttgttgaaggggaatatcaccggcataaagcggaattgtcttaacagtttctttattaatcatcgcttgagttcgtttattaacaataaagtacccctgattggctgctaccattatttgagcctcatcgatagtagtaaccgttaaaaaccggctttttattcctaaagcatcccgataatattgttcctcagccgctttttgtgtttcattaacaattaaaatgcatgataagtcagctaattgcgttgctaaaatacggttattatctggatagttcaatggtaaaactaccataaaatcagtttcagttaagaattcattgtggtattcgtttgataaagcacgccgctgatcggagaaagccagatcaattcgatcatgttttaataactcaaataactgttcatgagttccgcttttgattttaacctcgacttctggatacatttgcgaaaaatgggcaacagtatgcaaaaattcgttagtaccaaaattcgataaatagcctaaacgtaattcataattgattggtaatttaccaattttttgtgtctgatcaattaattcattagttgttttaacaacttctttggcgtgttggtagaagaattcaccagctgccgtcagttcaaaacttcttccctttcggtcaaacaatttaacatcaagcatattttcaagctccttgatttgctgggaaatggctgactgggaaatattattttcttcggcggcgcgggtaaaattatgtcgatcaaccaccgcaataaaatacttcatctgttgaaacatttacttatcctctcaatttgatttggaattactaaacaaagcaacgatgctcaatatactttgacccttcacgaattgacaacggtgccaactcttgctgattttactcaataaaatcacgaaccatgatttcgcatatatttttcatttgtctagcacattcagggttagcattgtgagcaaaccgttctttcaattgtctataatcaagcatctattcggctccacagcttttttactactatcttatcagatgtttattctcatcaagcatttcttttttctttaattcataatattcttcttcatctaaaaatgacatcacatggttttcaaagtggtcaaacttgtaggctagataattccaagttcattccgttttgcaagtaggataaagcctgtttaacgagaaccaattactaatattgaaaatatttaattttttgcttgactataaatgaatgatcgtttattatacaaatatgcgatacaaagatgaacacaaaaaagaagctatttatgaagcaacaattctacttctaaataaagaaggtttttcatcaacatcaatgtcgaaaattgctaaacatgccggtgtttcagcttcaacaatttatatttattttaagaataaagatgatatgttgaaaaaattgtatttagatactaagaaaaaaatgagcgccaaaatgtttactgatacaacaaatgatgatgctaagtctagcctagctaaggttattcgtaactatattgattttattttagataatcaggatgcttttctctttttgcaacaattcactaactcgccttatatgactgaattagatgagcgcgaagcaagcacctattttactccaatgtatcaattagttaaaaaaggccaagaggagggaacttttaaagatgtagacgctaatttattatttgcctacattgagccaccaattaccgaattagctaagcgtcatttcaaaggagaaatagattttactgaagaaagaattgatgtattaattaacttagcttggagtgctattaaaaagtagcactttaatttttattattacagtgaacgatcattcgtttattataataaaatcaagtgtttacttaatcgtaaccaaaataagcaacaataaatgaacggagactacaactatgcaaaagaaagtaacttttaaaaacaacgaacacgacatgtctggtatcttattctttccagataattttgatgaaaacaagcaataccctgctttctcaatcgcatctcccgctggtgcagttaaggaacaaattgcaactaattatgactcacggttagcaaagtatggctttattgccctagcatttgatacttcacatcaaggtgaaagcggtggcaaccctcgtcaattagaagctccttatgaacgtgtggaagacataaaatgcgctatcgattatttaacaactttgccatacattgacaataatcgtttaggtcagttaggtatttgtgctggcggtggctactcaatgcatacagctatgaccgaccgaagaattaaagctgttgtagctgtaagtatgagcgatccagcatcatggattcgtgacggttttgacggaaaaacctcagttgaaactcaattagccttacttgaagaagcttctaatcaaagaactcgtgaagctaatggtgctgagccaatttatggaactttcgttccagaagaagtaactgaagggatgcctaatactttagtagaagctcatgaatattatcgtaccccacgtgttcaacatcctcgttcaactaacaaggtatcaatgatgtcaattgataaaatgactgacttctccactttcttgtttgctgatcgctactcaactcaaccaattttgatgattgcgggtagcaacgctgacactttccgtttctcagaagatctgctcaaaaaagcagcttcaactaacaaagaactattcactattgaaggtgctactcacggtgatctatatgataaacccgaatacgttgatcaagcagttgaaaaagctgccgctttcttcaaagaaaatctttaaacatattaatgtgaagcgacttaaaatgaataaacaaatagtctacttttcaaacagtggcaataatgagcgtttagctaaaagaattgctcattattatggggttaatgcaacacctattattccagttaatccgtatcctaataaatatcatgagttaacttcacaggcaaaaatagaacgttttcggcacattaatgttgctattaaaccagttaaacttgaatcaaatatcaatactctaatcttagtatcaccaatttggtatgcagatttgccacgccccgtggtcacttttctgaaacaggttcagagatcttttcaacatgttgtttttgtcagtgacaagttcatgataggttttggtatttgcaagcgaacattaaaaaaatatttatcaaagcaaacaactattgatttaatagcagccaacagtaataacttttcattagttaaacaatactttcaaaaataaaaaaaactcttaaagattgacgtgtagagttctgtcttctttaagaggctttttttgtgtttgcttcacgataaatactttgaataaggctttctagtaaatcattgccaaatatacaactatccaattatttttttacctgaattgtcaaattaagtgcaacagttaggctatgaggaaatatattgcttgaagagttcttctgctgtgtgatattggaggattcggcgatatttgtggttaatggcatcagttgcctgttgaacataagcttttgacttgtctttcatgctcttgcccttagggaagaattgacgcaaaagaccattgcagttttcattggtgcccctttcccatggagaatatgggtgagcaaagtaaatctggcagcccttgatcttggtcatatccgcaaactcagagccattgtcaaacgtgattgatttaaaccaggcaggatgtctgtcaatctccttttgaagcagcctttggcatgtgcttgcccgatagtcaggaatcttgataactacttcaaagcgtgtggttctttcagtcaaagtcattaaagcaggctgattcttgcgtctgacgcctttaaccagatctccttcccagtgcagcggagcttttctgtcttcaatctctttaggacgctgttcaatggaattgccaagatgcttcttgtgcaaagcgtgaccgccatggctgtgatgacgcttgttcctgcgtcttttgagcttcataggcagatcaatattgcttatgtccagcaagccctgatcaatatagcgatagacagttggtgtgctgggacaagggtagcctggcatagtccttttgaattcaccaacgaactcatcgatgctggtggcatcaaatttagctttaaagcgtctggagagcattctcaaaaagacagcataatgcttcaatggattgcgctgatagcagtttttgcgacgcttctcataataaatctgtgcagtatcagcgtaatagtgctcatacaataaatagctgctgtctctttgcaggacacttccgcgtttgatttcgcgactgattgtcgacttatggcagccgacttcttgagcgataacagtacgggaagttatgccggaatccagcattgcttgaatttgtccacgttgtacgctggttaattgatgatagtgcttagaaatgctagaatttgaattggtcataaagatcttcctttcttgatttttcgtcacttcaagtttaggtcttcatggcctttttgtttaacacttagtgttgcacttcaattttaaatccgggaattatttttttagttaaatttgatgtaatatcagacaataaagaaatttttcctactccacgcatcccgtaaataatcgatatttgataacatcttcaaatgattcaactacattttcgactactttgtttctccctaaatatatttggggaactttaccaaagttagtatcaaatagatttttggcttctatagtttttcctccattttaaatttcttcagattttttgattttattttagatctaattacataataaaaagtaagctattacacttgctaaaatgaaatctaaactatttattacattgcttctcctattatgaaatgcttttaatgtctaattttgcttttttccatatcccagcaggtccaagccagcaataaaataatcagtacaataatagcataagcgaaaatcttggcatcttgcttaggcattatattaaatgaaacaaaggttgccggcaaattatataagttcaagaaaattaaaataatcgagctgatccagcctaagaccgaccagcttctcctatttttgaattgccccatcattcttttatcatcagtcataattaataatggaacaatcgaaaatgggacagcaaaagctaagaagacttgtgaattttctaaaagcatgttgagagcaaagtgctgctgagaaattgtgtcgttagctgtcataacaacgcaaatgataactggaattacggataatagccgagtaaataatcgtctcgcccaaagtggcatcttcaagtgaatgaagccttccattacaatctgaccagttaaagtccctgtaatagtagaattttgtcctgaagcaagaagtgctatggcaaagagaactgataaaattccagttttagctactgaaatcaaaattggattacttagcattgcagtattgcttaaagcatcataaagtccaaaaaatgaactatctttaaccgctccacttttaaaaacagctgctcccataattagcaaaagcacgttaacaaagaatgctagaataagttgaatatttgaatcccaagtagtaaaacgaactgcatttttgacatcatctggatcatgatgatttatctttcttgtttggcaaattgaagaatgcaaataaaagttatgcggcatcacagtggcaccaataatacctaaactacctgttaacggggaaagcccattaaccacgggatgttgtgcaactagttcgggactcggaaaaacagacaagaagatcttactccaattgggctctgctaacatgacttgataggcaaaaacaaataaaatcaccataatcaaacatgaaatcaaagcctctatttttctgaaaccaacctttgacaataataatagtagaaacacatcaaaaatagtgataaatgttgctataactagtggaattttaaataaaaggtttaaggcaatagctgcaccaataacttccgccacatctgttgccataattgctaattcaattacaatccaaagaataaagctcaatctcttactagttctagcacgaattgcctgcgctaaatccatttgcgtaacaattcctaatttagccgacatatattgcaacagcatggccattaaactggaaattaaaatagtagaaatcagtaaaaagttaaagctctgtccaccattgattgaagcagcccaattgcctgggtccatataacctacagcaactaatgcgccaggtcccgtataagcaaaaagcattctaaagaaattcttagttttaggaaccgcaatcgtactattaatctcagctagcgatttaccattagcatatgaaataaaactatgattttccatcaatggtgctcctatccatggattcctagtgtcattcgagcaatacgcgacatcatatttggattccattgcggataccagaccagtttaatttgacaatcatcgatttccgcaacgctctctgctgccttggtaatttcgttattcagccattcactcaaaggacatcccataatagttagtgtcatcgtaatctggcaaagatgatcatttacctcaatgccataaatcaagcctaagtcaacaatatcaacttgcaattctggatcaattacatcttttaatgcctggtaaacatctttttcttgatcagataaattttctatttctaacattaaccaattgctccttccatttggaagctgatcaatcgattaagctcaacagcgtattccattggcagctgcttggtgaacggttcaacaaatcccataataatcatttcagtggcttttctttctgaaataccgcgactttccaaataatacaattgatcttcagaaattttagaaactgttgcctcatgttccatcgccacatttgagttttcaatcgcattagttgggatggtatctgaagatgattgatcatccataataatcgtgtcacattcaacatgcgccttagaaccgtccgactttttagaaaacttaacacttcctcgataatcagttgagccaccgcctttggcaattgacttagaaacaattgagctagaagtgttaggggcattatgaaacatccctgctccagaatcttgatgaatcccgtggtgtgccactgcaatcgaaagcatggtaccacgtgctccttcaccatttagataaacgctcggatatttcatggtcaccttggcacctaaatttccgtcaacccattccatcgtagcatgcttgccagcaacggctcttttagtttccaaactataaacattatcagaccagttttggatagttgtataacggcaatatgcattgtccaacacatttacttcaaccacagccgcatgaagagagtcagatgaatattgtggtgcagtacatccctcaacataatcaaggtgtgcatcttgatcaacgataatcaaagttctttcgaattgaccagaattttccgcatttaatctaaagtaagcttgaacaggtgcagggacttgaactcccttaggtacataaataaaagtgccacctgaccaaacagcacagtttaaggcagaaaacttatttaaatcaattggaactaatttgccaaaatatttttttaataaatctggatattcctgcaatgcagtatcagtatctgtaaagataatccctaatttatcaaattgctctttcatcttgtgataaaccatctcagattcatactgggcagctgaaccagctaaatattttctttctgcttgtggtacacctaagcgttcaaaagtatccttaatatcctgtggtacatcattccaatcacgatattttttatcagtcattttttgataataaagcatatcatctaagtctaaacccgaaagatcaggaccaaaactaggcattggcattttttcataaatatggaaggcctttaatcgataatctaacatccacttgggctcatgcttttcagccgaaatttgtctaattacatcttctgttaaaccatgtcccgttgaaaattttggttttacattatcatgaaagccgaattgataatcttcatctttaactatttcttctgctttagtcattatcctcatcctcgttttctttaccaagtaatgctcgatctaatccccaccaagccaaggtggcacatttaatccgcgccgggaattccataatacttatcaagacttgagcgtcttctagtttttgcatgtcttgttcactacgttttttgccagctgctaagtctgaaaatatcctagaaaaactaatagcctgttcaatattttttccttttaccaattgggtcatcatactagctgaagccttactaatagtgcatccttccccatcaaaagcaatatctttaatttgatcattctcaaccaaaatagttaagtgaatcttatcaccacaagttggattataaacagtcgtttcattagtataattagcaagttgtccaaaattgcgtggagtttgagcatgatcgagaataactgctttatacaaactttttaatttatctaagctcaccgaaaaactcctttgcttcttgaattgaactaaccaattgatcaatatcattttttgtattatagattgagaaactagcacgtacagttgattctgtcttaaggctttccatcaatggttgtgcgcaatgatgccctgctctaacttctacaccatttaaatcaagtgctgttgctaaatcatgtggatgaatttttcttaaattaaaagaaatcacaccagtacgattactgcagtcttttggaccatacaccactaagtcatctatttttgataattcttttaaagcatatgctgttaaactatcctcatgtttttgaattaaagttaaatctaactttcctaaataatctattgcggcacctacgccgatcacgccagaaatattcggagttcctgcttcaaacttttgaggcacaggtgcccaggtagctccttttctagttacatttgtaatcatttcaccaccaaaacgataaggcggcatttgttctaacagagcttttttgccataaagcacacctactccagttggcgcaaacattttatgtcctgaaaatgcataaaagtcagcatctaaatcagtcacattaaccggaaagtgtccgacggcttgagcgccatctactacaacaatcgcgccatttttatgagctaagcttgttaaagccgcaataggattaattgtccccaaaacattgcttacatgagtaatcgctacaattttagtttttgtagtaattttactttttgcatcttccagatctaaacgaccattagcatcaatttcaataaactttaacttagcgttctttcttaaagcaatctgctgccaaggcaaaaaattgctatgatgttccataattgaaacaacaatttcatccccagcttggatattttgctcaccataagttgccgcaactaagttcaaactatctgtgcaaccactagtaaatacaatttcacttgcatttttggcaccaataaagtcagctactttttgacgggcattttcatatttttgtgtagcccttagccctaaagtatgaacaccgcggtgaacattagcgcgatcaaaattagtaaaatgttcaatctgtttttctacaactaacggcatttgactagttgctgcattatcaagatagatcaatttttcatcattaattttttgattaagaattggaaaatctgctttaattttcttaacgtctagtttgtccatcaattaattttttttccaaaatatcaatcatcttttgccgaacttccttattaggaattgcatcaagaacagcccctaagaacccgcgaattaccaatctttgagcttgatcatatggaataccacgactcattaaataattcatttgaatttgatcaacaggacccacactagccgcatgagcagcaataacatcattttcatcaattaaaagcagtgggttggcatctccatgtgcattatcagacatcattaaaactctattttgttgatcagccttagagccatgtgcaccatgaacaatctgaccaattccattaaaaattagttgagaattttcaagtaaaacaccacgttgatttatcaaaccagttgaatgtggcccgcggttggttactcggttgttaataccgactctttgatcaccagttgtaactgcaattgccttagaatccgcataactgccttcgccaattaattctgaatccaaatcgcctaaggtgttgcagtcattcataaaagcaattgcccattcaacatgtgcatcattttcaattcttgcacggcgattaaagtaaagcgttgtatccttatccatttcatcaagggatgaaaattcaacatgactacctggatgtgcaacgatttccaccattaagtttgcggatttaactgctttatcctcattttgaatttcttccaagaatttcacttgactgttatcctccgtaacaatcaataaatgtgaaatatatggatcttgcgtagggttcaaagtaactgtaattggttcggctaaaactgtatttttaggaatataaagaaataagcctgaatttaaatacgcataatgataagccgttaatttatcttcatcatttttaataacggaagctaatgcggatttaactaaatctggatattgctttattgctgtaaaaagatcgcataagatgattcccttatcgttaagaagatcatgattctctttttttataaaaaagtcaggttggttttgccacttaaaatcttctttagcaatcaacggccaatcttgataggaaaaacgctgcattttgggataagaaagtttatgcatcttttcaaaagaactagtccttaaatcagttaaccaggaaggctcgttgttttcctttgatgagacaagtatgttttctttgctcaacatttgacgttttccccccctaattttcatcaactaacttaatatgtaacccaagttcatcgcgaagacctgcatatccttctttttcaagttttttagctaaatctggtccaccgtctttaacaatacgtccatccatcatgacatgaaccacgtcaggcacaatataatcaagcaaacgctggtagtgtgtaatcattaaagcaccaaagttgtcaccgcgcatggcattaactccccgtgatacaactcttaaggcatcaatatctagacctgagtcgatttcatcaagaatgccaaaacttggtttaatcattaacatctgcaaaatttcgttacgtttcttttcaccgccagaaaagccctcattcagataacgctcggtcatggcttccttcatatctagcaaatccagatttttatctaattcattcaaaaaagtcatcactgaaatcggatcatcttttggtcggcgagcattaattgctacccgcaaaaattcagcattagtcacgccaggaacttctgctggatactgcatagctaaaaataatccttttctagcgcgttcatcaactggcatgttaataatgctttcaccgtttagcaaaatatcgccttgcgttatgtgatagcgaggattccccatgatagtctcagataaagttgattttcctgttccattaggtcccataattgcatgaatttcacctgtcttgagagttaggttcacgcctttaagaatctttttactcgtttttttatctttgtcttcaacttctacatgtaaatccttgatctctaaagttgccatttaaatcctctttttctacatttggtattgctgcttaactatcaaatacaacatatagataatataacgcaaaaaaaattttattttcagtcttgacttttaacctaacatgtttgcgtagtcatgaactggcacttgaagtgttaaatcagaaattggaaatgtaacacaagtgttgacatagttgtattcactatcggctgcacgacgtccaggaaatggaataaatacttttccattaactactcttgaacgacatgcaccacaaacgcctgagcgacatgatgaaggggcaataatacctgctctttccattgccaccagcaaactttcatcacttcttgctggaataacttgtatttgatcacgggttttaactgtcatgttgaaagtcttattctttgcttcctcaggataattcttgaaaaagtatggatttactgaaccggacatttcttgtcttacttgccctggacgaagatctaactttttaatttcttgatttacaaaatgaatcatcgcagctggaccactcatataaatagaataattcttatctgctggagcatatttttcaatgatggcctgattgataaagccatgttcatatccttctcgtattatataaattaaatcgtattatataaattaaatcagtgataatgattattcttttagtttgtttattcgatcatcagatgctagtctctaattgtcattgaccttggtcaattggtataggttgtttccttctgtagctttgactacttttttagtctgccgcccaagcagttttactaatgacttactcacatgctgtatcgattctggctattactgattcagagcagattcagtcgcagctttttagcttgaacctatgaatacttatattttgcgagattgtcttagaatctgtaattagggactaacatgtgatgatcgatctatgaccaaatatttgctagaaaggaggccattctcaatgaaactttttatcggaattgacgttagttcaaaagatcttcaagtcgctattactgactcagaaaattatcaaaaacctttacttaaccaatctttttctaatgacctgattggtgctaatgaggtcaaaaagataattcttcaacttgctaaacagaacagctatgacaaagtaattatcggcatggaagccacttcaatctatagctttcaccctgcttatttctttgccaatgacgaagatttacaaaaaattaatcttgaaactgatgtcattaatcctaaaaacactaaacgatttcatgacgtttacgaagaaaataagaatgatcctactgatgcctattacatcgctgaatacttacgctttggtaaataccatgtcactattgctcggcaagaggaatacttagctttacagcgtttaactagagctagatatgaaatcacatcttcgctcactagagctaagcagcacttcattgaaactctttattatcgtgtaaacaaactagttaccgttgacaaagacaatattaaaacttctatctttggcgcaacgatgctgtcaattgttactgatagtaaaaccatcgatgaaatcgctgaaatgccaatcgaggatctaattgactaccttcaaaccaaaggacgtggccgcttctctgatccagagactttagctaaagcgatcagaaaagccgttagaggatcatatcgcttaggtaaagtcatgaaagactcgattgatgccgtattatctgtttactatgccgaaattaaaactaatcagaaattgattaagaacttagataaagcaattacagatatcgtccaaacgcttcctgaagagagaatactacaatctattccaggaattgggtcagtttattccgctggtattatcgctgaaatcggcagtattgatcgctttgacactgaagcacagctagctaaatacgctggtctagcttggcgtcaaaagcaatctagtaattttgatagcgaacacaaaccgatgactaaaaacggaaatcattatctaagatattatttggttgaagctgccaacctgattagacaaagagatcccgtttttcggaagtactatcaaaagaaatacgatgaagctttctattctccgcataaacgcgcttgcgttctttgtgcaagaaaattaaccaggaccattttcactctgctcaaaaatggtcaaatctatcaaacaccgaggtgattaattggtctaaaacatttttggaggagtaaataatagttgttaaaaaatcccttgaaatagggcttagtttcatgcacgcaaattttggttttaaaacaaactaattaaaaataaaatttaacttttacattgacttattaccacatgactacttcttcatcacttaatatgttaacgaccttgaccttatcagttttggcagcaattctatctaattcatcacccaacaaaatatggttgtgcgttctacttccatataaaataatcaaatttgcatcaattgtgccatcagcaattgcaccagccattgagtaaaatggtgtaataccgctgccaccagcaataatggtcttcttgtctcttaatggttcatagaataattgaccagcaggacccgaagcagctacttcagtgccaaccttccaattctcccaaatataaggagttacatacccatttttgactaacttaattgtgagcatatattcgccagaaagcgcctgcttaggtgtgcttgaaatggcataagcacgtgtacaataacttttaccaatatgaagttttaaagaaatatattgacctgcttggaaatatgcaagtttgctggtaccttttgattcatctggtacaaatacaaagctcttagcatcgtcacggtcaataatcttagtgattttcaaatattgcgtttcaggatgaagctcctcttcaagaatgttcatcggatattttttaggcaactctgcatccgaagcattttgaatttcatgttttcgctcattttgaagcttctttaaatcaataattcccttaatctcttcaaatttattcatgatctgctcccatattattaatatcactaacagctatttttgctgcagttaaaccagtagtgtatgaaacattgtaaccatcacacataaatccatgaccaccgcagaaatataaatgtggcagtggatttacaacgttctttaaatccattgatctaccaataatttgatcccatggtgcacaatgatagccataaatttcaccatcaggtgttcccatatagcgagcaaatgttggtggtgcagcaattgcaatctcttctatagaatcactaattttaatacctgttgcctgttcatactcatcaatagcatttttagctattttaactttaagtttttcataatctttgggtttaacattatcccaaacaccatcatcaactaatttagtaatgtagcaaacactagtttccttaggagaagcatttggaatgacagtatttaagcaattcatgatcataaaatcatttttatccatagttttacaattttcatattgttttctagtatcacctgttgaagcaatgaacacactatagtcatttattccaagttctcgacaggatttatttagcccaagatacaccaaaaaggcactggttcctaatttatgtgagtttgcatattttaaagcatactcaggaatacacttttgatccatcatgttgccataaactgcgtgaggagtaattccacaaataacttccttagcaaaaactttttcacctttaatttgcacaccaacagcttgaccattttcaactaagattttttctacagttgtactcagccaaacatcaccaccattatcataaattacttgtgccaatgctgttgacatatcatgacttcttctttgaggaatataggcatcgttttctacataagtagctaacatagtggcaaaatacggaaattcaaattcatcagtgggaatatcaatgtaacaccaatatgctccaagaatttgttgagcttttttaggaagttttaatttgttaagcacatcatcccaactcttagtagcatactcgataaaagctggatatttttttataacttcttttttatcctttccatctgctatttctgctaacgcattcatactttgctcacacagatcaaaaagcttttccatcttttctgaagtacctggtacatatttttccatcgcattaataaaattttctctaccagctggcatcttaacatcaaatccgtctttaccataaataatatagcgataagtatctggtaattcttgcatttttacgttggcacctaaccagtcatacatttttcgtactgcacgcggattatcagcatgaccatattcacataattcatgcaaggctacttcaaactcaaatctgccgcgaataaaactggttgctgctccaccagccagattatgtctttcaatcaatagagtttttttgcccattctagcagaacttgcggcggccattaagccgccattgccagccccaactacgataacatcatatttttcagccattttttaaccctttcgttttcaaatgattacgttttcattataattaatatgaattaaaaaaaggatcaaagtaaagaaaaacaaagttattttatataaactagccgttggcttctggtcctaccagtgcaaaggagaataatatgaaatttcacccaataaatgtacccactgcaacagatttattcttcgttaatcaattaaaaacagcaatcttaacaggaaagtttaacctcggcgataaattacccagtgaaagagttttacaagaacaacttcaagtaagtcgaactgtgatcaattccggattaaaaaaattagcggcattacattttatagaaattcgtcctagatatggggcttttgtagcagattatcgtgtcgatggcgatttgcaaacaatgaacgaaattattaatttctacgggggacattaccgaatttcacttttaaattcgatttttgaaatcaggaaactaattgaaaatgatgttgttcgcttagattgtatagaacaggatgaacaatgcctgcaatcagctatttcaaatatgcaaaatcttgccaaagccaccaattccaaggacgctgcacaagaaatatttgcttatgtacatagtttagccttggcctccaagaattatgtttatcctttgcttatcaataactttaaatcaatctatttaactttaggtgaatggatctgtaatgaagtcgatgttaattctatttctgaagagaatctaaaattaattaaattaatcaaatcaggagataaaaatatagcaattgcttataataacaaactgattaattggagttacgagattttaactaagcaataaaaaaacggtcgatttgcttttcgaccatttttacgcacgttttgcgcgcgattatttatttaaaacatattttgtagatctaccctcaccaattctctcaacataaccttgctttgttagttgtttaagtagatttaaaacttttgttttaccaaaattacttgctcgactaatttgtgtagaagtatttgcaccctcgcgaatggttctaaatactttcttttcatcatcgcttaaatcatcagtaataaattttagaattggtaaaattatttttattgaattttcaaagatctcgaactgtggttgaactaaacttccttgataggaatctttaattctctttattcctgtaccaaattgttcaattaaacccaatctaaaaaagacattagccacaataggatttcttaaaatagaaatttgacctgacagatactcatctttactcaagttatgaggtaatcctcctggagaaactacttctattcgattatcaaacatagaaactttaatttgagcattaatattccaagtcctatgaaccaaggcattagctattgcttcacgaaaagcttcttcaggaatttgacttataacgttacgagtaacaccatgtatttcctcacgctgataatactgccgatatttttgaatagtttggtcatactctttaagaattgattcattctcatagtttgccctatccagcataatattaatattttcaccaaagcgaacgacatcaatcccacgataatgatttttatctgctaataattcacccgcattagtatatccggcattcttctgttctagattaagagtaattagcacatcggatgtcaatttattaattcctagtttttcttttagtgccatttctaaaatattaaacgatagattttgatttgcagctgttaaactgtcataagtcttattttcgccaatcaaaattagttgtgataattctgttctatccacttcaattgaagcactatcatttcttttataagcttttgctttatataaatatggtggattatcgccctgttttaccgtcaacgtgactacattagttttatcatcaatctctaaattataatctggatgtggctggatggaatcatttattttattctctacatttaaacaaaaatcaattggattttttacaccaataattgttccatcatcctttataccaaatttaacttctcctgtaccataatttgcatacgcactaaccgtttttaaaaatgtgtttgtaagattctctttaaattctaaattctttgtttctctcacttaagtcaccttgccaatctattttatctacaattatactctttcgcacgcaaaaaaacggtcgattttattttcgaccgtttttacgcacgctttgcgcgattatttatttttcgttcacgataatcaatgacttaattgcttcacgattgctcattgcttcgtatgcttcttggatatgatctaaatcaaaactcttagtaaatacttttcctgggttaatttttccatcaagaacagcttgtaaaagaacttctttatcaggcttagttactgaagcaataccaccgcgaagaccgacatttttccagaataattggtttgacttaggctctgcatgtggtacacctactctaccgattaccgcacctggacgagcaatttgaccagcttgttcaattgcactttcagcacctacacactctaagaatgcatcagcaccagcattttccttagttaaagccagtacatctttaactgcttgatcatcacgacttgaaacaatgtcagttgcaccaaattcttttcctaattgtgcacgatcatcgtggtgggataaaagaatgattttttcagcgcccaacaacttagcaccaataacaccggcaagaccaacggcaccatcaccgataactgcaacagtatcgcccttcttaacttcagcgtttaatgctgcgtggtaaccagttgccataacatctgacaatgtttgaagggatgccaattgatcatcagtataatctcctggcttaccgggaatcttaactaatccagagtttgctggttcatatttcataaattcggcttgatagccaccgttagtacccggcttcaaattcaagcaattgccttcaaaaccattaatacatgcaacacaatgaccatatccatgagtaagagactgtaaaatagtttgtgtaaggatgaataattccttaaatttatttcttaaaacattagaaaaaggagttcctttctcgtatgattggtttgaacaaaaaaacacatacagaaagaagaactccttcatgaatgattttacaaaaaatatagcacaagctctattcaatcaagacaaaataaacgatttattgcgcaaagagctacaacaggctgttaataacttgctagaagctgaattgactgcctttctgggctatgatccctatgccagaaatggctggaatactggcaattctagaaatggtgcttatttccgcaaggttgatacccagtttggaccaattgaagtgcaagtgcctcgagatcgcaacggccagtttcatcagcacacgctgcctgactacaagcagcactctgatgttttggaaagcacgattatcaagctctactccaaaggcgtaactaccagagaaatcgctgacttgattgagaaaatgtatggcagtcattatagtccagcccaagtatcaaatatttccaagcagatgctccccaaggttgaggcttatcacaagcgcaagctaagcgacaagtttttctgtgtctatttggatgcgacataccttcctttgcgccgagaaacgtttgagcgtgaagcagtctatattgccattggcattaaacctaatggacataaagaagtcattgactactgcattgcgcctagtgagaacattgaagtctggacagagatgcttcaaaacatgaagtccagaggcttgaagcaagttgaactctttctttctgatggtgttgttggcatgaaaacagccttggccaggacttatcctaaagctcattttcaacgctgcctggttcatgtcatgcgcaatatctgtgctaaagtccgggtggatgaccgcgaaaagatcatgaacgaattcaagcagatacatcaacagacaagcaaaaaagaagctgcagctgtcttgcacaaattctatgccagatggaataaagcttatagcaatgtcatcaaaggtttgaaggaaattgagcccgatctgctggtcttctacaattatcccaaacaaatcagagcttcaatttattcaaccaatatgattgaatcctttaacaacgtcatcaagcgtaaagctaagcctaaggcagaatttccaactgaacagtcgcttgatgcatttattggcatccaggcaatgagctacaatgaccgctatttcaaccgaattcataaaggctttggtcaggttcaggataccttagaatcctattttgattaaataaatgattaaaaaatcaatttacgagaaagaactatttacacaaaagatttgacagtttcatgagtaaatggtacgagaacaaaatcatttggtttaatattagttacctcatcactaacttcttcaacgacaccaattgcctcatggccaattaaagacccactttcacgatcagcaattcctctaaaccaccataagtctgaaccacaaacacttgcacgtataacacgaataattgcttgattttcaccatcgatttttggctttggaacttctcttacttcaactttacctggttctacaaaaactgctgctttcatattatttctccttactatcgtttactttatatacatagtctaatcaaaacagactgtctataaaattactaatattaaatgctactattcaaaaaacgtatagtaatttcatttatgaaaaagaaccgcttgcttaaaacaaacggttctaactattagttacttattaatcttcatcagtattttggtgctcttgactgtcattttttctttttcataatccttgtcatgatctttttcatcatcttcagtctcagtctttataatcttctgatttttagcatcaatttcaacttcggttttcttacctccatcttcaaattctactttccagattggctgatcatcatccatttctaatgaccattcaacaggttgacctgatacctgagtttgagccaattgagtagcttgctctcgagtcatcatattattaagatctaatgcttgcgcctcatcatctgaatctaatttttcagattcagcttttaaaatattgccattacttgcatcaatcttaactttgtattcattttgtgaatcaaaaccttcaatttcatacacatatgaattcttcttttgctctagttcaatctccttaattgattttgagccatacttttcataaaacttattaactgcatcttcttgagaaagattaatacttgcagtacctgtattactttgattttgttctgtgttattgctttgactctgttgcgtttgagtgccagtagaagcattagcctggttaatcgccaataaacttgcgccacccgctgctaagcctaatgcagctgctgccaatgatacttttttaatgttaaactttttcataattgaattcctcgcttttcgtattaattaactttgtacacttagtttacgaaaaaaggaacctttaaaaaccaagatttaatgtagatcaaatgaaattttcttcattttagagttttttctaattaaattgatttttcaataaatatcctatacgcgtggtgctagttaaatcgttctagacaatatgccatattataagctaaaatagctatttctagccgctgttgaaagcctactggacttcttgctcgattattctcagcgttgtaataactaagcaaagaaaagtcgctttcaatgcttcttctaattgccatcaattgatgatcattatgccttctagctccttgcatatttttacgatatggcgtccaaagcacatatcccatgtgctttagattagtagctagatttttgcttaaataaccttcatctcctaaaagataatggttggctggatgagcattgatcatcaattctactgtctctttggcatcatgtactgacgctttagtaactgcatagtcaagcagatagccatcatcgcttactattgcgtggaccttgaagccataataatagactttcttggttgctttataaccaatatcagctacgccctgaaagatcttgacacgataattgcaaacaggctggcaaactggcactgggaaactatcaataatcaaaaattctccagctgtctttacttcttgattccaagcctgacggatacaacgaattagaggcaagagcattcgagctcgacggttaaaacgagaatgagataagccaacgaagaatttacagaatcttcgttgagattcaattccaatttcagtttgccaaatgagcatcgctaagatagaactattaggaagcttggtctgatcaacatttttacgatgtttaagtccatcaggcgcataaagcttatacagcgagcgacaaatcacatttaaccgattaaaactaacttgtaaatggtgagaaaaacgattaagcttgagatagttcaattagatcagactcttttctatttaaattacttacaacttgagtctagtctaattggacttttttattaactaaaacgatttaactagcaccacgcgtatcctataaatttgtctcttttttgacttgttctagagcctttacctgtgcttgatctaagggacgatactcattcatcttattaagtaattcagttaatttgttggtattcattttatcactctcgtgttcattagttgcttttgttaattcattttattatagaaccctcaataatcactaaaaggaatttcaaaaagatttagcgtattttatcacctttggaatttttctaattaaaaaagttattgacaaatttagaaagcggttttattctaagaatgaattaaataatgttcttcgaggcagggtgaaattcccgaccggcggtaaagtccgcaacccgcataagcggttgaatcctttaatggtaccgatagttagagtctagatggaagaagaataattttgctgtgctcttttctattttgatagtaggaactgtacttaaattattttttgaatgttagttagaacctcgaggtaattcttcgaggttctttttttgttctgttaggaagtgaaagaaatggaaaacagtgatgaagcatatatgcaattagctatccaagaagcgaaaaaaggactctatcaaacatggaagaaccccatggttggagctgtcatcgttaaagatggcaatatcttggctacaggtcatcatattcgttatggttattatcatgctgagcgtgatgctatttcaaaactaactccagaacaattatttaattcaaccctatacgttactctagaaccatgcagtcattatggtaagcagccaccctgctctgatttaattgtctctagcaaaattaaacgagtggtaattgcgcaagtagatccacatcaactagtaacgggtaaaggtattgccaagttaaggcaacacaatattcaagtaacggttggcgtattagaagatcaagcaaagaagctaaacaagttttatacttacttctaccaacataatcatccatggataacgttgaaacaggcggtcagcttagattatcgaattaatgaggctaaaaatattcgcactcaaataacaaatgaaactgtttatcagcgagtacatagagagcgcgcaaattatcaagccatcatgattggatcaaatactgccattatcgataatcctagtttactgactactgtcactacggattttccacccattcgaataatagtagatcgacgtggtagattactgaatcatttaaatattaagttattaacggataagttaagtccaacttggatttttactcaaaatacaagcttagctaagactccacataatgaaaatatctcaatttttttgatgaaaaacgcttcaatcaccgaagtcataaaaaaactgaccaatgaagagatccagtcggtttatgttgaaggtggtcctaccctagctaatgccttgctagccgaaggtcaagtaaacaatttaattacttacataagtccaattttacttggtcaaaaaggaaagctaggaatttcacccagctccaaaacaactttacataatttacgtgctgaaaagttggatgataattttagaattgaaggtgaaattaatgtttagtggtctagtacgcggcgacgcacgaattgctgctattgataaaaacgatgaaactattgttatgactgttgcttgccagcccgactttactaaaaacttgcaaattggcgattcaattgcagttaatggaacctgtttaactgttgagcaatacactgatacttcttttgtagtaacgatgatgccacaaacttatcagaaaactacttttaagaatttggatatcaatgcccaattaaatgttgaacgttcactacaggtcggacaaagattagaaggtcatctagttactggacatattgatgatattgccaaagttacggaaatcaggactaacgaaaatgctattgaagtttggtttgcctttcctactcgcttaaaaaatcagattgtagcacaaggtagtattgcaattaatggcgtatcgctaacagtaatggatacacatgataatgttttctcagttggattaattcctcatacacaagatgaaacaaatttaagtaagttaaatgtcggctcagaagtaaatattgagactgatatcttaagtaaatatgtcgctaaaaatttagaaaagagaatttaaaatggacgtaaaaaaaattcaaaatgcaattcaatggatgaaaaatggtggtttagtgattgttgctgatgatgaagatcgtgaatctgaaggtgatatgatcggcttagggtctaaagttactcctgaaaatgttaactttatgaccaaacatgctcgtggcttactttgcacccctgtaagcaaaacaattgcccaacgtttaaatttctaccaaatggaacaaaataatactgatccatatggtacagcttttacaatcagtgttgattacaaaaccaccactactggtatttctgcttatgatcgtgcggcaactatcaaggcaattgctgatcctacttccaagccagaagacttctttagaccaggtcactgttttccattagtcgctaaaggtgatcaaatcaagaatcgtaatggtcacacagaagcttctattgccttagctcatcttgctggcgaaccagaagttgcatatatttgtgaagttatgaaagctgatggccatatggctcgtcgtccccaactgaaagaaattgctaaagaatatcacttaccatttttaacaattgcagaactacaagaatatattaatagtcctgtgagtaaacgctcagagtttgtaaattttcccactaaatatggcaatttcaaaattaaggctttcgccaatgaaaacttagctattattaaaggaaagattgatcctaaaaagccagttttagtacgtcttcattcagaatgccttactggtgatacgtttggctcaatgcgctgcgattgcggtgatcaattacatactgccatgaagcaaatgaataaaaatggtagtggcataattctttatttacgacaagaaggacgtggaattggattaattaacaaattaaaagcttatggtttacaggaccaaggttatgacacttatgaagcaaatgaaattttaggttttaagccagatgaacgaaattatattattgctgccaagattttaaaagatctaggtattagtcatatcaatttgcttactaataatcctgataaaattgatcaactagaaaataacggtattactattgaaaaaagaattcccttggaaattcctgctaataaggtaaatcatgactatttagaaactaaacgagataaattccatcatttattagaagcactatagtgaggaacacagaaatgaatatttatgaaggaaattttaaaaacaataattatcacgttgcaattgtagcatccaagtttaacgaaaccgttacccatcatttagttgacggtgctattgctactttaaagcaatttggagtacttgaagatcagatcgatatctattgggtcccaggtgcttttgaaattggttttactgctaataagcttctcaattcaaataactacgatggtattatgactttaggcgctgtcattaaaggtgagactgatcattacagcatgattattcagaatgttacaaacgcaattatgcagatgaatcttaaagcagaagtcccaataacttttggtattttaaccactgagaatattgatcaagccttgcaacgatccggcttaaaagctggcaatgaaggttcctctactgctcagagtctattagaaatgatttcgctaaataaacaaataaagtaatagagtagagggagattaattctcgcccctctcattgcaccggacgtacggttccgtatccggcgctacgtttgtaatcatctacgagataaatagtattctagcggatcgaccaagcctgggcgatccgctttgcttatgcccaatacttttgggctaagcaaaaagttaacaacatgtccggtactgcgtttataccaacctaatcgcgtattagctactttatgaatatcttcgtcgctaaaattgcactttaatgccttgttaatccgcattaaattagtgtatattcttcttggcagtttccattgtttaatgattactacccgtatcttatggcgcagccattgactgaatttaaatagaaagtatttcataccgccaattttaaagtagttaatccaacctctgaccacttgatttaccttagtaaagactaacgatagaggttgagcagctgctttcctgcgacaaagaagctctctaatcttgttataaagcttggacaggattggcgaaagcggtccgccttgaggcacgccaatcttattgggcttaaccaaaccatcttccatgataccggattttaagaatgaccgaatcaaatggagggtggttttgtcatttactcgttctctaattattgaaattaatttatcatgattgaccgtgtcaaaatatttctcaatatctaaatcaattacccattgatatccatcatcttcatgattgcgtatttaatttctgcttgatgctttctgaaatagctatcaagttcttcaaccattcttttatctactcccggagcacctttattaatcttgactctatgaatcgcttctttaagattgctctgacttagaatctgttcaattaatttcatctcgtaatatctccatttctacttgtaaatttattcagaatcatcccaattgctttcaccatcaaagagttacgttctctttgtgctaggctatcctcttattcggactatctgaacattgcttatagcgggatatgctcttacaaacattaggtccttcgctccagtctcattacaagactttcaacactactatgacctcagctgacttcttgcgactaacctttttcgaccaggcttacgatcgctgatgttaaagcttgctcagcttgcctgtccgcaagatctctcggggtaagacattcatctttgattttccactgcctcctggtttaccgtcttgactttacgtttgtcttttggacttcgacttgtatcgcagccttatccgccatttggcctaaccaggtttctgtacgtaggctcggaaaactcgctagccacttccttcacccatagcgtcaccgctatcggcttgtggttcactacacttggcgacaaatacccgtggtccaaactttcattggattagatgaaatgtcatgcccgacacacaagtaaaaagccaccgaagcactaatacgcttggtgactcaaaggtctaattataagtttcttctactagtagctcatatggctttagcaagtaggtagctcccgtttctttgataggataattttgcacaacaacttttttgcgggaaatatgataattaacttaaacttcccacacgcaaaattgcttgtttcattgtgattctgcgtgttttgacaaatataaaaggcacaagtccttttcattgctataattatattgaccaaaacataatttatttgcatgaaaggcttgtgccaatgtctattttaccatctcctgaccaacaaaatgaacaactattttccaactcaatcatcagcttcatcaagaagtttcaggtgatcaagctgttgagaaaatgtggcttccgcaaggaaaaaggcattagcctgttcagcttgtttctttacgttttaagcaatgtctttcgtgaccgcagcttatatatgcagctgaaaatggatcattttcaagaaaatttttccaagaactcatattaccgttttatgcgcaacgttcacgtcaattggctccacttcaccacacttctgtctgcgcaaatcattaataaccacttgcgatctttgacttcagaaaaacgggctgattgctttgttgtcgatgattcctacttctctaggaccggcttcaagaaaacagaattagtcgccaaagtttttgaccatgtatcaatgacttacaagaaaggttttcgcatgatgaccctgggctggactgatggagcttctttcatgccaatcaattcagtgctgctgtcttctcagaagctacagaatatgattggcgaaaataaagtttttgatcagcgcaccattgctggccaaagacgtatgcttgcccggactaaaggcacagacgtgatggttaatttaatcgaccaagctatgaaagcaggtcatcaagccaagtacgtgctgtttgacagctggttctcaaatccacatcaaatcgtccagctcaagcaaaggaagctggatgtgattgccatggttaaggtgagctccaaaatcaaatatgaatttgagggagaacgcaaaaacatcaaacagatttatcgcagctgtaaaaagcgatgcggccgttctcgctacctgctgtcaatcccagtcaaagtcggacgccaggacaaagacggtgctaaaatagatgcacggattgtctgcgttagaaaccgtgccaatcgcaaggattggctggcaatcatttgtaccgacatgtcgcttagcgaagatgaaattatccgcaactacggcaagcgttgggatattgaggtttttttcaaaacttgcaaaagttatctaaaactaagtacggaatatcatggccagtcttacgatgctttgaccgctcatgttgccatagtttttactcgctacatgcttatgtcagttgccaagcgggacgatgaagatgaacgcacgctaggcgagctgttctattgcatgattgatgagctggcggacattacttttagccattccttgcaattgattactgatgcaatgctggccagcgtaaagcaagtctttcatgccagtgaagcacaaatagctgaattcacggctgactttatcaatcgtttacccaaatacatgcaaaaattgttaaagaaaactagcaaaaataatatagaagcctaaagccaagcaagatcaagagattactggcttatttagtgtgggaagtttaagtaattaattcttcctgaattgtcaaattaagtgcaacagttaggttatgaagagatatattgcttgaagagttcttctgctgtctgatattggaggattcggcgatatttgtggttaatggcattggttgcctgttgaacataagcttttgacttgtctttcatgtgcttgcccgatagtcaggaatcttgataactacttcaaagcgtgtggttctttcagttaaagtcattaaagcaggctgattcttgtgcaaagcgtgaccgccatggctgtgatgacgcttgttcctgcgtcttttgagcttcataggcagatcatgtccaccaagccctgatcaatataacgatagacagtagacgtgctaggacaaggatagcctggcatagtccttttgaattcaccaacgaattcatcaatgctggtggcatcaaatttagctttgaagcgtcttgagaacattcttaaaaagacagcataatgcttcaatgaattgcgctgatagcagtttttgcgacgcttctcataataaatctgtgcagtatcagcgtaatagtgctcatacaacaaatagctgctgtctctttgcaggacgcttccgcgtttgatttcgcgactgattgtcgatttatgacagccaacttcttgagcgatgacagtacgggaagttataccagaatccagcattgcctgaatctgaccacgttgtacgctagttaattgatgatagtgtttagaaatgctagaatttgaattggtcatgaagatcttcctttcttgatttttcgtcaattcaagtttaggtcttcatggcctttttgtttaacacttagtgttgcacttcaattttaaatccaggactcatatttttttcactgtttttatttttttgtcttgatcgaatatagcttgagcaatatttttggtaaaatcattcatgaaggagttcctctttctgtatgttgttttttgttcaaaccaatcatacgagaaaggagctcctttttctaatgtttagggaataaaatttaaggaatcgtccatccttacacaaactattttacagtctctaaaaacagtatctttcaactataattactaaaagatactgtttctttataaaatctttcctaataaaaaactattccatcatagcgaccaatgtaattaatgctgcatcgtaataattcgtatcagtcaaacgattagtaaaaacatactgttgtgaaacaaataaattatcaaattccggtttctttaattgttgcactgcaaaaaagatcggagcactaatactcggtgaagcataattgtttaacgctttaccattcaattgatagccagcagtcacttgtttttgcttgctgaaaaagcgtaacattttagtaataattttctttgctcgtgcatctttgctagtagctaaaaataatggtacgcgacaagcattgccagaataatcaccatcattttttccagctacttcattggctttagctggtctaacaccttttttactaatccaagcaaaatctggaactaagccagaagaatgttgcttgctcaattgatatagttttgtcagcattaccttcttgatcgttaaccattgagaattaccagtcaactgataaaaatcatcaaagtacgtcggtaacacgtcagaggttcgcattaagtaataatacttcgatttcttattagcccaatcaccaacagtcagcgtctgagtagtcgaattataatcataacgtaagatatcagctaataatagcttagcctgctgcaagtacttgggttcgttccagagttttcccgctttaatcaaactttctgcaatgtataaatcgccatcagttgcattagtagaataaacttttttatccacttgcttccatgacattaattcagtttgttgatcatcgatagtcaaccgattagccaggtaaaaccgatataaccgttgaaaatcttcttttttagcccaccccttttcaccagccatagcagaaatcaacatgccatagccttgaccttcagacaagcttgtgcgtggtgcagcttttatccaagtttttccatcactttcttcaaccacataatcttctttccattgacggtacaaattacgatgcaaggtgcggttattactaccacgaacataaaacatgatcgcgataaaaagcccaatagtcagtaagatcaaaattggggtaatcctgtttttgttttttaacatcaatctgtaaacctctttgtttttacccacttcgttgcttcgcgatggaaaagtctgtcagcaattgctgaccaaaccgcattaatcgatataatgataaacagttgtgagtatgtaaaatatgatgccacagcaagccaaagttgtctagttgtaacctgaccaaattgggtactggcagccacactgatttggagtacatagagtagaatcatcaacaaccaattaaaaagtaatacttgactgagcaatagattcccagcagtaaaagtaaatggcatctcaactgttggtacccaaatttttattactgcaaaaatcagattaacaatgaaaaagatatctgataagactactgctgcattaaaccagaaaaagatactggacatataaaaagtttcaagtttgacccgccaattactatggtcaaataaatgccgaaaattgttaattactacttcgtaattacctttagcccaccgcaagcgttgataataatagtcctttagcttctctggttcttgttgaaaggcttcagaattatgtgctagggcaattaatttaccagtgcccaaaatcgtaaatgacaaatcagtatcttcagttaaagcaccagaacgaaaaccacctaactcttttaaaaaagccgtcttaatcacaaagttagtgcccggaatgcgcccaattttgaataattgccaaactccgcagtgctgaattcgatgcgttaccacaatttccaagtttatacagctagtcaaaaagttttgctttgcattccgcgtcttattccgtccaaagctagccacataacgttctggatcttccaatacctttttgatcaagaaatacaaggcattttcttcaggcatcgcatcggcatcataaacgcataagtagtcgccgtggatcatcttaagcgcatcgttcaaaactcctgatttaccaccttcaccagttcttctgatcactttaaactgtcgtttctgatattcagtccgattgccaatggcttcagccaattccgctgttcgatcagtgcaattatcagcaaaaatcaaaatttcgactttatcttctggataattcaagttcagaattgctttgctagttttttgaataacagcttcttcattatgagccggtacaacaatagaaacggtaggataatactcaagtggtgtaattttagcaatttctttactgtgttttaaccaaaaaagcaccccgccccaaagcgtaactaacgaaaatagaatcgataaccaaattgaaatcaaggttagtatctgaaagccttcagtcatccaattctcctttctgactcttcattaatgcctgttcgatattgccataaattttataagcacagaaaaaaatcactaaaaatgcaattgcaaagattacagaaataatcacggacaaataataaaaccagttcattttgctatctttcctttatgtattcagtcacaatttcagtttccaattcacgacgcaaaaaacgaattacagctatcaaatcaggaaatctatcactattgtcgacattaatatggacactcgcatgttttagcgaaacaggaatcggcaactctaactcgcttaattttgtatcaacgatgtgattgaccttttttactaattcattggggatttctggcgaaattatcaaaaaagtcgcatctcccataaagtaaataaactcccccttaagtcgattatttttcaaaactttagtaatctgcttcaggatccgatcatgactattaggatgagcttccgcatactgcttatgttgatcccaactcacaatttgaacgttggaccataaatcgagttcgggatgctgctcaattttatgtagttcattctgataaaatttttccgcactatcgaaagttcttagctttaacctccggtcataaagcgaattataatgccgaatttcgtcattgcgattggtaaaaaagctccagcgaatgatgtgctgtctaatgacggtaactagactagcctcaataggataagcaatcaataataaaaatttttccttaactggcattactacatagcctaacagtaagaatcctgctccaatcgtggtaagaattaaaatcagccaagtaacatcgactcttgaaaagattaagccggttaaaatcgccaaaatcaaaatcattactaggccattaaagacattagctgggtataatcttgctagccataataacaatatcgggaaagtaacgctggcaagataagctaaacctgctaatttaaaatactttctggtcatttttataacatcatcctcaattatgctatttatttacaatttttcattgtaataatttaggaaactgtcaaatcttttgtgtaaatagatctttctcgtaaattgattttttaattatttatttaatcaaagtaggattctaaggtgtcctgaacctgaccaaagcctttatgaattcgattgaaataacggtcattgtagctcattgcctgaatgccaataaaagcatcaagcgactgttcagttggaaactctgccttaggcttagctttgcgcttgatcacattgttaaatgattcaatcatgttagtcgaataaattgaagctctgatctgcttgggatagttataaaagaccagcagatctggttctatgtctttcaagcttctgataacatggctgtaaaccttgccccatttggtatagaagtcatgcaggacagctgtggcttcttctttgtttgtctgttgatgcacctgtttgaattcgttcatgatcttttcacgatcgtcgacgcgtactttagcgcagatattgcgcatgacatgaaccaaacagcgttgaaaatgagctttaggataagtcctggccaaggctgttttcatgccaacaacaccatcagaaagaaaaagctcaacttgctttaagcctcgggatttcatgttttgaagcatatctgtccagacttcaatgttctcgctaggtgcaatgcagtagtcaatgacctccttgtgcccattaggcttgatgccaatggcaatatagactgcttcacgctcaaatgtttctcggcgcaaaggaaggtatgtcgcatccaaatagacgcagaaaaacttgtcgcttagcttgcgtttgtggtaagcctcaacctttggaatcatctgcttggaaatatttgatacctgagctggactgtaatggctgccatacatcttttcaattagatcggctatttccctggtggtcacgcccttggagtaaagcttgataatcatgctttccaagatatccgagtgctgcttgtagtcaggcagcgtgtgctgatgaaattgaccgttgcgatcccggggcacttgcacttcaattgggccaaattgcgtatcaactttgcggaaataagcaccatttctagagttgccagtatcccagccatttctggcatagggatcatagcccagaaaggcagtcaattcagcttctagcaagttattaacagcctgttgtagctctttgcgcaataaatcatttattttgtctggattgaatagagcttgagcaaaatctttggtaaaatcattcatgaaggagttcttctttctgtatgtgtttttttgttcaaaccaatcatacgagaaaggaactcctttttctaatgtttaaagaaataaatttaaggaatcattcatccttacacaaactattttacagtctcatcttttagccaagagtattgtaatagacatataatacagtacaatgattattatcaattacataaaattgatgcaattaaaaattttaatcctgaaatttttccagtttatgacaaaaagcaaaaacaagtttattactttaataaagaagacttcaactatctggacgacacagatgccactttaaagaatctacccaattgggaaaaagactcgtacaagctgtattaagaatttcaaaatgattttgaaggcaagcgttttattgctcttccgtctaaagaagatttaaacgagaatagactaatctttgattactgctgccagcttgaaaataatcaactaggcaatctgttacttgatagttttaatggaagacatgcttttcgaaaattcaaaaatacactttatcaaaatcatcttctagaagactatgaaaaatataaatatcaagccgagaagaaattagcaaccaactggtgcaaagaacataatttaatctaaaaaacactgacaggtcaatttgatctatcagtgttttttcatttatcgatcaatttttggtgcttcaccaatctgtgcttgcatcatccagattctcttttcaatatctgtatggcatgacgttaagatatcatttgagccatagtcgccttcctcgtcacttaccttaatcccttcttcataaaggtgctccaaataacgataaccagcaatgatagtcgcaaatctttctctagttgaaattccccattcgccaggatgagcttcgatcttagtatgatcaagcacttcctgtaagcttgaatatggtgaaccatcaatcgtgatcaatctttcggagatcagatcacgttgttcatccaactcgtccattaccttgtccaagtatgggtgcaatttcaaaaattcaggtccgcgcatataccagtgttgttggcgcacaaccatcattaattgagtggtgtcagccacagcttgatttaaaatttcttttgtttttggatacttcataaatttgcccctttcaccaaaaataacttactttataaaatatatcatagctgatgaaagtgattacagcaaattatttgattatcaaaaaagtgcctagaaaatcagcttcttttcctaaacacttaattatctatttctcttctttttccttgcagtggctcttgcacatacacttttgctcatcggccatcgggcaatgacaaatgccatctttaccagcgcaagggcaaccatcttggcatttcatcccattatgacaaaacttgttttccatttctgtcacctcgatgccatcattatactctaaattttttgttcaatatcactaattttcacaactaaaacagctctaatccactcgaattgcgccttcatttgatcaaaataagttccttcagtgatgaacttgccactaccgtgaatgtgatagccgcggcccataccagttgtgccaggataattgtaagaaccaaccgcgattgtcaaagcgtgctcaggatctgccttcaaatcattttgaattgagtgcatccccgcagccggaatcaaaatcgtgtcatcagccactacattaatatactgtgaccaagtattcaccacactagccggcttaccgttaatcgaaacgattgtagcgggtcccttatcacgtaaaacatctaagaattcttctgtcataattgccataatttttatctcctctcaaatttgtaaatataatataaaggctaatcccgacaaaccatgacattatttaatattttttcataatctgcttcaacttagtgagataattcttcttcaattcactcggctgcaatacctgcacgtcgctgcctagtgaaatcagataatcaaccaaatagtgtaattcttctctattatactttccttggagataaattttccctgcatcatgcacaatattcataatcgggtaagaattatacttcaccttttgctcgccattttcagttaataagcaagaatacggcacttgataataattttcttcatatttttgcaagttggcagttaatggttctttattcattattttagtttcagttggtaaaacacgaactgcctcgaatttatctaaacgcaaaacgtaccattttttcaggtctaaattataggcatgacagaaccaattgcccgcctgaaagaaaatatcgagcagctgcagtttttgttttccctgcacaaactgaaaattttccacttcaattaagctgttatcaatgcatgccttaagcaaagtcgcgaaaaactttacctcatttaaacttggctggctatagaaatgcactaattgtttctgcaacttaacctgctcttgtaaattctgcggtaggcttttaaccagtttcaattcaatttcatcatacgcattgctgtacggcgtctcactgatcccgcgaattgcttgcaatgcaaaaaagatggcgttaatttcttgcgtgttaaaccgaattggcagcagcaatttactattagtcaaatggtagccgccattgcgcccactttcagtataaaaagctagacctaattgctccaaatccgcaatatcgcgcaaggctgtccgctccgaaatagcaaaatgttcttctaattcttttagatgagaaacttttttgtcactcaaataaattaattcttgattcaatcgttctgattttttcatggatttctgccatcctaaattagatcaatctgacgcaatttccttctcaatctgccttgttcttcgagtaaagcaaacttacgcgacaaagtttctggggtcgtaccaagatacaaagctagatctttcagttttaacggtaaaacaaaactattttgaccaatttcatttgcatacatttgcaaatatttgaataagcgctcttcaactttaggtaaagttaacaattgaatttgcttttgcatagcagaaatttttgtcatacttaactctaataatctaatgctcaattctggctgctgatggatcaacttcaaaaaatcttgtcgccttaataaacatatttcactattatcagttgcttcaacataactatgcgtattaacttgaccaaaaagccagtcttcaccaacataatcccctgtatgtaagacctgtaagacatcctcatgtccagtttcatctaatgtatatagcttggtactgccatgggccacaattactaaattagcacttacagttggatcaataactatctcacccttttgataattttgatgttgcaccaatctttctagttttattttttcatcttgtggcaaagccgtaaataatggtaccagatcaacgcataaatcagccattaaactcattcctttaactaaaagtcatcatcgtcttcttcagtatacaatccttctttgagatcatggcctaaaaaactttgacttactctaatctgttccttaatccaagcaagcaaatcaatcaaattagcagctaactctggccaattttcatcattagctaaggtaatagccttagtaataaacaaaatctgcgtatcaaaatccttcaccaagttgaataattgttgttcacctgcaagatatttgctactgccatcttcttccaacatggtatattcctgaaattgcttgctagtagtcggaatactttccccgttattaactaataaatggtttaaacgcttgaattcttcatgctcatagttcagccactctgttgccttatctgctaagaataggcttgcactgccttgagcaaacaagcttgcttgactgattttcaaagaatgaactaacaaattagaaataatatgaccagtcattgccgctgcagttggctgatgatgatcaagatcactttgttttaattctgcttgatacttttcttgtgcattcatcaattaagctccttttccttgattccttgtacttcataacccatcttttcaattgcagctttaacatctactgctttaactttgtctggatccatcgtaaacttgagcttccccgcattgaacattaccttaatttgatcagttccatccaaattatcaactgctttttcaatcttagtcaaacatgaaggacaagtcatacctgccaatttcatcattactttttccatttatctaaatttccttcctattagtttacatgtttaatgctacatcgatttgttttttagaaacttgatgatgatcaagtttttgcttaaacctaattaatcgcatcccatttaagataacaactaaaatactaaattcatgaataaacatcccactagccatttctacataaccagcaaatagaccaataaatagcagtaatactgttaataaagcaatagcaatattttcgttcatattaagaactgtcttttttgctaaatctattgcataactaactttacgtaaatcatttttgactaaaacaatatctgaaacatcaattgcgacgtctgtcccacttccaatcgcaatagcaacatctgcgttagccaaggcaggactatcattaatcccatcaccaatgaaagcaacgtgataacccttttcctgctcctttttaacaaaagcagccttatctgctggcaacatttcgccataaacttcatcaattggtaattctgcagcaacttgcttagctgttttaaaattatcacctgaaagcataactaattttttaacgcctaatttcttcaagcgagttaaagctattttagcctccgggcgcaactggtctttaataccgaataccgctaattgactttggtctgcattagcaaaaacaacaattgaatttcctaaattgcttaaatgatttatggtatgtaataattcctgattaagatgagtattttcagtaattaaattttgattaccgagataatatttttcaccagaaatagtagcaattaggccctttcctttaacggtttctactttaatcacatctgatgcttgattatctaacttggcaatcgcctgagctaaaggatgattactttgttgttcaatttgagcagcaagcctaattatttcattccgttgcccctttagtattttgatcgcactaacttccggatgacctacagttaaagtacctgttttatcaaaagcaatttcgtcaatcttacgagtttgatccattacttgagatcctttaaaaataatgccattctttgctccattaccaatacctgccactgtcgacaccggcacaccaataatcaaagcaccgggacatcctaataccattactgtgattgctagtttaagatctctagtaattaggccaactataattgcgatcaccaaaacggcaggggtgtaatatttagaaaagcggttaatcaatttttctgcatgagatttggtatcttgagcttcttctaccatttcaatgatcttgccaaaagttgtatcctctccagctgcaatagtctcaatcgtcaatgttccatcttcaagaattgtccctgcataaacctgattgccaatttttttattagccaagctagattcaccattgatactagcctcattcagatagccagatcctgaaacaatttttccatcaactggaatttgatcacctgttttaactaaaatccttgtacccggatcaataaaatcgacgtcttcttccttagtggagccatcatcttgcattaccaaggctgttgttggagccattttggttaaatctgagatagctgagcgtgttttcttcaaggtgacttcctccaaaaaatcgcccagcataaacaaccaagttacaatagctgcctcattaaattcaccaataataaacgcaccaagtactgctaatgaaactaaaacatcaattgagattaatttaaccttgatagatgaaattgccgttaaaacaatcggaattactccaataatccccacaaccagcattaacaactggtatggcagatttaaatgtaacaaccattttgatccctctgccaacaataacaaaattgtatttaaaagcaggatttgctttttatactttatgaaaaagcgttgtactttaatcattttttcccctttcctttacctgacgattattatcataaaagcaaaagaactctaaaaacttgatgatgatcaagaaaatcaaagatttataatttaatttctgtcaatatttgtcagtatttgcgactataataatcttcagagaaataatgagcaagaaaggtgacaatcatggttgatattttaactaagcaaactactaatcaagaattcttagactttgcggtcgagcaagttcacaacgccgatatcgttactactcacgcaggcgagcctagcgcccaagtttgcgacttattattgaacaaaaacggtaaattatatatcgcaacttcaagtcaaaatccattttttaaggatttgattgctcagccaaaagttatcgtggacggttacaaggggggacggaacgatggactattgcggtttttcaattcgtggtacaatcaaaaatgttgatcacttatatcttgatgaaattttcgccaagaatccttatctcaatgaaatttatgccgatgacctagaaggtgctaaaaaagatttacgtgtccttgaaatcacgccaattaccgcgggctacttggattaccgtactaagccagtcttcatgcgcaacttcaaattctaaacaaaaaaatcagagctatcatttcgacggctctgattttttgttttttcaattaaaagaagattttactcatgatgatcataaagaccaacaaacaagttgagctgattgcggcagcaccgaacacggcaccaccgcgcttgaagatcaccttgaagttaactgagattcccaaggcagccattgccatccctaaaaagacatatgcggcttgcactaagagatccagtgtttgagcagataatggcaaaaatgtcccgataatactcgttaagataaagccacccaagaaccaaggaattggcaatttctttggcgccttggtatgttctgcctcactttcagtcaccaaacgcttttggtaccagtaacccacgattaaagcaaccggtgctaataacaacacacgtgacaacttcataattaaggagctatccaagctgatctcaccaaacgcactaccagcggcaaccgcgtgagcaatttcatgtaaagaaccacctgcgactacaccatattgtgtgtcggttaagccaagcagcggcttaagcatgatctcaagtaatgtgaacatcgtccccatcacacagacaacggccactgccaaaacttcattttctctttttctttcttcatcagtggtctcaatttgtggtgacacacccatgacggcggccgcaccgcagacaccacaaccacatgctgaaagaatagcaagctcatcttcggcgccaaatttgcgactcagccaataagtaagcacgatcgtcccactaactgcaaacgctgcaactaagattgtcttcacaccagcatcagccaacttggtcaaattaagccgaaagcccaacaaaataatccctaatctcaaaaacttgttggagataaaacccataccacttttagcttcagtctgaacgctctgcggcgtcacttgcaatgcaatccctaacagcaatgcaattaccaaagctccaattaagtttacatatggcaacttagtcaagaaaattcctgctacagaacaaaataaagtcattcctgcagctaaccaaaatgatttagttttaattatgtttgtcaacaaaaatccctccgtatgtgatcaatttaatttgacaaacacaactcccttaatgatgatgtctataagtttactcttgttttctatctttgacaaggtatattgttaattatttcacatttattcaaaaataaaaaaagaccaagtatctgcttgatcttccacatattgacaaaaaggagtgtacaggatttgaacctgcgcgccaaggaaaacttggttcgccggatttcgagtccggtgcattaccactctgccaacactccgtaacaaaaatattataacctattatttgaataatgccaaaatatctttattattttgactgtctttttgtctccgtaactgctacactttgcagtagtacatcgtactagtaaaagatatagaaaagagaataaattatgtgtacttctattatttttagtccacaagatcactatttcggccgtaacctcgaccttgaagttacctttggccaacaagtagttgttactccacgcaattacgtcttcaacttccgcaagatgccagagatgaagcaacactacgctatggtcggaattgcgcttgacgctggcgattacccactttactttgacgcagctaatgaaaaaggtttaggcatggccgggcttaactaccctgacaatgctacttactacgatgtagttgacggtaaggacaacattgcttcatttgaattcatcccttggattttggggcaatgtgaaactgttgctgatgctaaaaagttgcttgaaaagatcaacatcgttgacatcaacttctccgacaagatgcaagcatccccacttcactggttaatcgctgataagaccggtgtttcaatcgtggttgaaactgacaaagacgggatgcatgtttacgacaacccagtcggctgtttgactaacaacccacaattctcaagtcaattattcaacttaaacaactacgccgacgtttcaccagcaatgcctaagaacaacttctcttctaaggtagcaatgaacggctacagccgcggccttggttcacgcaacttgccaggggggtatggactcagaatcacgctttgttcgtgtagccttcaacaagttcaacgctcctgttggcaagactgaagaagaaaacgttgataattacttccacattttgcattcagttgaacaacaaaaaggccttgaccaagttggtcctgacgcattcgaatacaccatctattctgatggtaccaacctcgacaagggtatcttctactacaccacttacaccaacaagcaaattaacgttgtcgacatgaacaaggaagacttagattctgctaagttaatcacctacgacatgttgactaagccaacttttaaccaccaaaactaaataattaagaaataatgttaattttgtctaaagattagcattatttttatttttacggttaaaatagatgtacttattaaagtaattggggattttcttattaatgaataattattttgtgttgctgctttcggcggtaattttactctggcttatttttaacatcaaaaattcacgtcgttttaacctttttgaccattggttacaccaccagttggtgaaacgtcacgacggttatagttggcaagtcatcgccttcatcaatgatcctaagttaatggtagtttgggatgtgctattagcaggattattactaaatgaagagcgtaatttgactgccctttgggtgttagggaccttgggctttgcggatatttctggtattattttgaagaaattaatccgtcgccagcggccactaatgcattccgacaaggaagatggctacagctttcctagcggccacgtacttggtgcgacaaccatggggttaattgttttgcaactatttgccaaggatttaggtaccggcttcgtcattgtggtcgttgcactatgggccatggtgatcttctctcgtttgagtttgaaggcacactacccctctgatgtattaggagcaaccagtttagccatcgtttgcttcagcatttcacaacagctatttttagccatttaaaaagatcacgtttatcgcgtgatctttattttttattcgtgaaagccaaccataatgccgccttcttcggcgtagaaactacacaggccatgcatcggtcgaatcgttatttgcgcatcaggatattcggctaaaatcttttccttaattgtggcagcgtctttttcattttcgcaatgatcgattatcacttctccaccgtgataattatcttccttcatgtacttgataatttcacggatggcctttttcattccacgagccttagtaagtggctcaagttttccttctttacttgctgttccgatcaagttgattttgagcaaacctgcgattttggctacagctggtgaaacacgaccgtttaaagataaattatgtagtgattgcaaaacaaaaagcaaatgagtctgcattctaaacttagcaattgcttcttctagatctacaaagcgcatttcaccttgcagcattttctcaataccatggactatgattgctagctcaggtcccgcacttcttgaatcaactactataattttactcaagggatgtttttcctcatacattgcttttgcctgaagggctgaagaaaaagtgccactcatcccgctggtcattgtgacgataatcgctttttctgttccttcaagtgcgtcaagccatgcttgaatacttggacaagttgttttgcctgccacattattttggtttatattggacaaaaattccttcatattcaaatcttgattatcaaggtagtccttaccaccaaaagaaattgtcagaggcactacttccaaattacgcgccggatcattattcatattggcacttgagtcaacaattaatttaatattttccattttagattccttattttttgtatttattttaatacatatattatagtcctttgatatagagttttttaggctgctttactaatttttaaaatgtaaaccgctttcatatgtttacaccgtcacaaagttaggctaaaatttgagatgtaaagcggagcaaaaattgttccgtatggtatgaaaaacataccataatttttgaggaggtttattaatgctcaaatcagttattgaaaatgtacacgcacttgaaattttcgactcacgtggtaacccaactgttgaagttcacgttactctttcaaacggtgtcgtaggtaaggctgaagttccatcaggtgcttcaactggtgaaaacgaagctgttgaattacgtgacggtggttcacgtcttggtggtaagggtgtttcaaaggctgttaacaacgttaacactgaaattaacgatgctcttaagggtatggacccatacaaccaaccaaagattgacaagaccatgattgacttagacggtactccaaacaagggtcgtcttggtgccaacgctatcttaggtgtatctatggctgttgcagttgcagctgctaacgatgctcaccttccattgtacagataccttggcggtactgatcttgaaatgccacaaactttccacaacgttatcaacggtggtgaacacgctgacaacggtatcgacattcaagaattcatgatcactccagttgctaagacttcattccgtgacggtttcgaaaagatcgttaacgtataccacaccttgaagaaggttcttgaagacatgggttacgaaactggtttaggtgacgaaggtggtttcgctcctaacatgaagaactcagaagaagctttgaaggctcttcacgaatcaatcatcaaggctggttacaagccaggtgaagatatcgctattgcatgtgactgtgctgcttcatacttctacaacaaggatgatcacaagtaccaccttgaaggtaaggttcttactgatgaagaattagcagattactacgacaagcttttggacgaattcccagaattaatttctatggaagacccatacgacgaaaacgatgttgacggtatggttaagttcactaagagccacaaggaccgtatccaaatcgttcttgacgacttcatttgtactaaccctgcacttttgactaaggctatcaaggaaggtgctggtaatgcttcacttatcaagttgaaccaaatcggtactgttactgaaacccttgaaactatccgtctttcacgtaagaacggttacaacactatgatttctcaccgttcaggtgaaactggtgacaccttcatcgctgacttagctgttgctgttaacggtggtcaacttaagaccggtgctccagctcgttcagaacgtgttgaaaagtacaaccgcttacttgaaatcgaagaagaacttggcgatggtgaacgtcttgccttcttcccagacgatgttgatcacgattaatttcgagttaaccgagtacaatttcaaaaaaagcatgagaattaattttcccatgcttttttgcttactcatttaatctttattttactaattgactaaagattttattcagagatgtatctttaactactttaactacaattgggttgccattcctagactgatcaagcaagataaccggcttatcagatttaaggcagaataagtaagtattgtgccaagatttaaagtcatcattagcaattgccagcacattataatcatattttgccttgcccgttggactgtagcctatcttaattgactttttattcaaaacaaaccgattagttgctagcactccaggataagttgcaccctttttggtctttaaattctttttcccatcataaaactgataggtctgaccggactttttaccccagttattgactgcagtctttaacttggctgtcttagctgtattccaaattacaacagccgactttttagtcctatttttcttattctctttgattttctttttcgagtcttttttaggcttaatcttcttggaacttgaagattgtaccttggcagatttagccttttttacgtttactgttttcttattttgttttacttcaccaatcgtcactgcatctttaccaaaatgtacttgactacaacccgtcaaagtcacagctaaagtgactgcagcaatacctacaaaaatttttctattcataaatagctccatttgttatttcttatgtctattatcacacaaaacctccctctttaaccgctgtttaaataaaaaaagagctaattttcatattagctctttttaattaataaattgtaacttgataacgatttgaacgatccgttgcttccggtttttctccaatcttgccaaccggcacgatgacactcgtctgaaaggcaggatcaatccccagctccttctgcaattcgctgtcatcatttaatctagctgcaccgcccattacataaactgagccaagacctaagtctgtcgcctcaagcataatgttctctgcaccacaggatgcatcgcgctcgccaaacatgctgtcttttttagtattaattataaataatactggggcatgataacacgcattatcggtcttcgtctcaatcttgtcgcgcaatgcttcatctttaacaaccaccaagctcattacatctgtctgatgcattccacaaggagtcgtttgaaaagcagcaattagactcttaatctcatcgtctgaaatagattcactgctaaagtttctaacagctctccgatttgtaaaaattgaattaaccatatatgcctccgtttttactttacatgcctattttagcattcaagattttattgacaacgttttcatgaataattatgatggtggtaaaaagtatagatttttatgaggtgaatacataatgaatttagcagcaattgatattggtggtacaacgattaaactcgcaacttggaaagatggcaaattacaaaataaccatgcagttgatactcctaaggatttaaatggcttttatgatgttttaacagcagaaattaataaaatcaaacaagatactaaaatcgaaggagtagccatctcctcacccggtgccgttgatcaaaagactggaatcattggtggctcatctgccttgccttacatccataattttaagattgttgacgaattagaaaaaagatttgaattacctgtatctatcgaaaatgatgctaactctgctgccttaggtgaattagctgctggtgctggaaaaggttgcaattcaatggtcttttttgttatcggtaccggaattggtggagccttaattattaatcaaaaagtttggcatggggctcatctttttggcggtgaatttggctacatgctaatgggaacacatactttaagcgaacttgcttctccggttacaatggctaaccattataatgaaagaaccggtaaaaatcttgatggtaaaaccgtttttgccttagctgatcaagatgatcccgttgcaagcgatgtccgctctactctaattcattccctggcagttgccatctacaatattcaacacagctttgatcctgaaaaaatagttctaggtggtggcatttctaacaaccctgagttaattcctctcctaaacaaagaaattgatcaaattgaagcaaattcagacttacataccttaaagcctgtcattgccctctgttcactaaaaagcgatgccaacttgcgtggagcagttgctaatttcgagcaaaagcatcaaaattaatcaaactataattgttattttatctaaaataatctttctacaagcctatataaatgggcttttttctttatgtaaattaaaagtatagatttttaactaattagatctttattttcattattaatctgatatacttatttatgtagataaatgaaagtgcttacagagggagagaggaaatagatgactgaaaagcgcaaattgccatccacctttttctggggcaactcagtttcaagtatgcaaactgaaggtgcttggaatgaagatggcaaaggtctctccgtttatgatgttcgccctgctactgacaaaacaactgattggcatgtagcaattgatgaatatcatagatacgatgaagacctcgacttaatgaaagatatgcacctgaacatgtatcgaattcaaatttcatggtcacgtgtatgtcctgatggcgacggcgacttcaacgaaaaaggtatcgacttttatgatcgtttaatcaatgcgatgcttaaacgtggcattgaaccaatgatttgtctttaccatttcgacatgccactgaatttagctaagaaatacaatggctttatgtcacggcatgtagttgacgcgttcgttcgctttggtaaaaagatgattgatcacttcggtgaccgggtaaagtattggatcgttttcaatgaacataacctttacttccaagatgaagttttcaatatttcaggttatgaacatggtgaaaagagcttagatgatatgtacaccatcttccaccatacgatgatgtgtcacattcaattagctaattacatccacgaaaattattctgatgtaaaaattggcggtatgcttgcctaccaacaaatttatccagctaccagcaaacctaaagatatttggtctgccaaacaagttcaagaatttttaaacttcaatatttatgatgctgatactggtcgtggttactcaccagaagtaatgcaatatgccaagaaccatcacatcaacatggatatcactgatgaagacaaagaaattatgaaaaaagctaaagctgacttccttgccttttcatattactcatcatgggtattatcaagtgacaaaattcctgccggtgaggctcctaaccgctaccttaaccaaggcggcgtagaagccaaatacgtaaaaactaacgattggggctgggcaatcgatccacttggcttcagaaatgcaatcactaccatgtataactactaccgtattcctattttccctattgaaaatggtattggtcttaaagaaacatgggatggcaagaatatgatcgaagatgatgagagaattgcatatcatcgcgatcacattaaagccatgaaggatgccatttttgatgatggtgctaaggttcttggctatctcggctggggcttaatcgatattccaagttctcatgctgatatggaaaagcgctacggtgctatttacgtcaacagatcaaatcatgacttaaaagacttaaaacgtgtacctaagaaatcattttactggttccaaaaggtacttagtgataatggagatgaattataatggctgatcaaaaacaatctggatttggcttatgggttaaccaacacataatgccaccaatcatgaaattcgttaacactaaagcaattaccgctctgcaaaatggtatggtttactcactgccattcattattatcggttctattttcctgattttaggaaatattcctattaagtccgttgcagatgcaattaatgcttctggttggggtgctatttttgcacaagccaacaacaccactttccaaatgatgggtttgtgggctgctattggtattgcttatgtttatgttaaaaacgaaaattacgaacctttagcaccaggtcttacttcagcagctgctttcttaatgctacaaaacttaagcattgataatccattaaaggctgctttaacttcaggtcttactgatggttcaatgacaggtaaagtagtaacagaaaacattgataaattgcctcatgctttacaatcattcttagaatcacctgttactggtgtaattaacactaagtggcttggtggtgacggtatgatcgctgcaattatcgttggtttacttgttggttggatctacacaatgattatgaaggcaggttggactattaagatgccagctcaagttccacctgcagtatctaaccaatttactgctatgattccttcaggtgttatccttacaggttcaatgttgatttatgctgcatttaatgcatttgcacacactgacttcttaaactggatctacaatactttacaaattcctcttcaaggtatttcagactcattcggtggtgctatcgctattggattccttgtaccattcttctggttcttcggtgtccacggtggtttgatcatgggatcacttgttgctccaatgcttcaagccaacactgctgacaacgctagattattcgctgaaggcaaacttactattgctcaaggtgctcacgttgttactaatgaattctacaacaacttcattaacttaactggttctggtattactattggtttaattatcttcactttagttgctgctaaatcagttcaattgaagtcaattggtaagttagaattagtacctggtatcttcaacattaacgaaccattcctcttcggtttgccaatcgttatgaacccaatgcttgctgtacctttcttcttaactccattagtagttgctgcttcaacttacttggttatcaaaactggtattgttccaccacttaatggtgttgccgctccatggactacaccagctgttatctctggtttcttaattggtggctggaagatggccatctggcaggcatgtacgttacttatttcaacagctatttactggccatttgctagaaaatacgataaggtattgctcgctaaagaaatgaaagaagctaaacaagaagcaaataagtaaaaatatgctaatcatatgaaattaaatatagttttagaaagagagatgccattaatgcttgtaaaatagtaaaaatgacgtctcttttttgataaagtatagacttttgttttaaaatagaagtataagtataaaagtaaagaagatgaaaaaacatggcaaaggcaaaatatttagaggtcgcaagtgaattaaaaaaacgtattgaaaatggtgtttacagtaagcaagagcccttacctgatcaagaggcattcgctaaagaatttgacgttagtcgtctgactgtaaaaaaggctttcgatggtttggagcgacaaggactagtttataaacaatctggcttaggaacatttgtcgcaggcgaaattccaattaaatctgatattgattctcccgtcaatgcttttactggtttaagaaacttactaggaaaaaacgaagttacaagtaaggtgctacacttctctgttgagtttcccgatgagcaaatacaaaagaacctcgatctaaagcgaaatgaaccagtctataacattgttcgacttagaatctatgatgatcaaccctacattattgagcatacttatatgccaattaagctggttcccgaattagatgagaagattctacatgcatcaatctataattacatccatcaaaaattgcatttaaagtttggtcatgcttatcgaaaaattcgtgctgctaaacccaacgaatacgataaaaaattcttagatgctaaagatgatgacccaatgcttgagctagaacagattatttggcttactaatggccaacctgtcgaatattctgtcagtaagaatcgttacgatacccgcgattacgttttattagataataaccgattttaggaggtattttatggcattctcaaaaaatttcacttggggtggcgctactgcagctaaccaatatgaaggtggttatgatgaaggcggcaagggtttaaatgctgttgacgttttaactaatggctcagcaactgaaccgcgtaaggtaacttggaaaaagcctaatggtgaaactggagctacgcctctagtttgggggcaagaatttagtctacctgaaggtgctgttccaactattttagacggttactactaccctagccaccaaggaacggacttttatcaccactatcaagaagatattaaattaatggccgacatgggctttgatgttttcaggctatcaatgaactggtccagaattttgccaaatggtgatgacgaacaacctaatgaagacggattagccttttacgataaagtatttgatgaatgtgctaagtatggcattgaaccactggtaactttatcccactatgagacacctctttctttaattacccgctacggtggctggaaagatcgccatttaatcgatgctttcgttcactactctgatatcgtgatgaagcactacaaaggcaaagttagatattggcttacttttaacgaaatcaacgccatggacatggctccttatatgggtggcggtttaatcgatggtagcgaacaaaatcgtgctcaaggtgctcacaatcaattcgtagctagcgctaaggtagttaaattagcccatgaaattgaccccaacaaccgtgttggccaaatgctagcttattctgcctactacccttacacttgtgatcctgctgatcaacttaaagtgatggaagccaagcaagagatgctcttctacagtgatgttcaaactggcggccgctaccctaactatcgtcttaagaaatatgaacgtgatgggattaagcttaatgatacaccagaagattatgaattaatcgctaaatatccagcagatttcttaagtttttcttgctatacttcaaacgttttaaccactcatgaagctgatgctaaagctaacggtaatgtttctgctggtggtgtagttaacccatatcttgagagtaatgcttggggctgggcaactgatccagatgttttacgaatcggcctaaatgagctctgggatcgttaccacaagcctctatgggtagtagaaaatggtttaggttctgctgacacccttgaaaaaaatggatcaattcatgataactatcgtattgattacttacgagaccagatcaaatcaatgcgggatgctgtcacaattgatggtgtcgatttgatgggatacactacctggtcagcaatcgatcttgtctcaaatgggactggtgagatgaagaaacgctatggttttgtctatgttgatcgtgatgaccgtggcaatggctcactcaagcgttatcctaaagattcattctactggtataaaaaagttatcacctcaaatggtgaggatttagactaaaacttttatttataagtagagcctagctaaaaagtgctagactctatttttctaaaaagatatgatgaaagcataagtaatatagatgagagaaggaaaagtatgattacaattactaaacaattcaacttcaaggctaaggacttctttgattaccttgaagaacaattaattcctgctattaaaaaagctcgtggtaatgacatgccggtaacgcttgctaaaggtactaaatacgaggtggatggtgcccaagtagaattaaccgattacgaaagaaacaaggtctatggggctcattttaagacagatcgaatggaattagtgattaaatatgtcactgaggataacgatcaaggcgtaaaaatcaccttttctgaagacatgcttagctttgaccgcgagaaacacggcaaactccaaactatgttttacaatttccaattaaagatgggcgcaaagaaagaattaagacgaatgggtgacaatgttttagctaatattgcagcttaaaatcgccatctcagcagcaaaaagaccataactacttctaattgtgttgtagttatggtcttttttttgttcaaattaacaatcttatctatatcaaaattaatctattagttcttagtagcgtcagcctgttccttcttcaataagacattgtcatagtgcttgatgaatgggaaccaaactaagaaggcaacaagtgcacaaacaattgaaagcacggcaccttgccagctagtagttgcaagataaccactcaaacccactggagttggccatggttgttgcacaataatcttaggtactaaatgtgaagttactgcgatgtaacccaccaagccagaagcaagtggagcacaaatgaatggcacaagcaagttaatgttataaacgattggcaaaccgaataacaatggttcattaatattaaaaatggcaggaaccaattcaaccttaccaatttctttcaattgagctgaacgagaaccaaaggctaaccagattgccatccctaaagtagcacctgaaccaccaataattacaaaggagttcatcggatcacctgcaaagaagtgattagcaccatttacattagcagccatattagctaaaacaattggagtatagaatgagctcatgatagtagcaccatgaattccgaaccaccataagaagtgaatcaagaaaatgataatcaaaaagccccaccaagtatcagcaattgcactgatgaatgagaatggaatgtaaagaacttggaaaatatcagttcctaaagttaccaaaattagttcaatcaatgcaactacaacagcaatacaaaagcctgggatcaaagcgctaaatgagttagaaacaccagatggaactgatgcaggcatttttattctccagttgtgcttaacagtgtaacggtagatctgaactgtaagccatgcaattactaatccagtgaagataccaacggcagcaattctggtaataccatttgttgaggcttcataaccgcctgccaccattttagtcttagtaaatgtagtaataaattgaacagcaccatttttccaaataagttccggaacagtaatgaagaatgccattaagaacatcatcaaaccgttcatcggtaccaaatcaattttctcttctcttcgataaatatccgtgtatgaataagcaaaagtacctgcaaatactaatgccaagatacccatagtcgagttgtaaactacttggaataagccactaaagcgtcctaaagtattcgcataaaatgcggcaaatcctggaattggaaatgcttgaggcagcacattcaaaattaagaaaactgccccgataattgaaaatgaaataacgctataaccagcgtccataatagctctaacaaaacgtgaacctgcaaatttacctgcttttgcagctagcgcatctttaaaagagccagattttgaatcagccatatttctttcccccaatattctgaaacatcattaaatctgaacaaccttattatagcgaaagcgttttctaatgtaaacgttttttattgatatacgatatattttggttttttaaaatgtatatttttgaaattacttctaataaaaaaagttcatgtaactttacatgaactattgttggtgcttcttaaaagtctctatcaccttgtgataacgatcttgatcattcataatttgatgaattcggtattcgctccaaacacacaataaaatgccagctaaaaacaaagttgtcataaagaacataatactttgattttcgatgaatgggaataaatacttacccaatggcaaaaacgtcaatattataaaaagcaaatttaaagctgcttgtacttcaagataaactctgctaattgggacctctcgttttcgattatgcattttagttaactgctcaatcgaagcaatcccactataaattgtcataattgccgaaacaataatgccaagaacactatgataatttacatcaataattagccacatcaagttggtaaaaaagaagatagtaataatatatctaattaacaaatatcgactaaaatacatatacttaatgctatcttcatgtcttttcttagccgtctctgtctgttcttttttaatgttttgtttattcatttttcttcgtctcatttcttgcctaataattatatttaagcacaaatcaggcaaaaattatcgaaaaaaataactcccgcattcgcaggagttattttcattttcaacgattacttatcttcttttttaagagagccagattcatacagcttttcgtaaagatcaaccatttctccagctaaatctctaaaagtgatagcattcatcaagtgatcttgagagtgaactaccaacaaagttacatgcatgtggtcgccttgagcttctttagttaacatgccagtttgtgaattgtgagcttcaagaagtgatttgtcactttccttcaacttttcacgagcacctgcaatattgccttttttagccaagcgaattgcttcaaaggctaaactctttgcattaccaccattggcaattaaacccatagcagccattaaagtttcttgttctttttgttctggagttttcttttcttctgccataaaatctgtctcactttccttagctattttagctaattaattattcacctttgatcaatttttcagcttgtgccaaaacgttagcaccattcatcatgccgtaatcttgcatattaattacgtctaaaggaatgtccttaccgtctttacccttacctttaaccttgttttcgaagtcacccttcatgtaacttacttgaggcccaagaagtacacaatcgatttcttgttgtgccatcttgtcatcagcttctgatgctgggcaagcaaagatttctgcatcaataccttgttccttagcagcagcttgcatcttagttactaagagtgaagtactcataccagcactacaatttaacatgatagtttgttcagccataataaatttcctcctgaaatttttattttatagtttaattagcttttattgatctacaccaactattataaaacgctttcattgatttgtaaacaaaaaattatacatgcacggcttagtcttaccatgcttatataatcatctcaagcaaaagatatatacttttatctcctgacagccaatattatatatcctttgtaagcattttcaaatacatatcctcagcatgttaagcaaagtcctttgcatacgtatgctttaacataaaaaataaattattttttagcaaacgctttcaattaataaatgaatactgttagaatgtatatgtaatttattcctttacaatagaaaggaggcagaatcttgagtcgctatcaagacattgccaatgatatagaaaaagatattattgagaaaaaatatacaagaaaactacctgaacaatttgaactggcccaaaaatatcaaactagtcgggtcacaatcgttcacgccttaaagattttacaaaataaaaaattaatacggactgtcaagggacatgggacctttattacaagcaagtctattcccgacatttttcttaattctgatgtcaatgagcataccggctttactcgtcacgtcaataatgctctcgcaataaccagtaatgtgattgcctttaacattcgcaaacctagtattagtgaacgaaaagctctttgtttagaaaaagatgacgaagtttacgatattattagacaacgaattttaaataaaaagccagctaaattagaatataccgtgatgccagttagccgcatccccggtatcaccctagatattttgcacaagtcaatctactcttatattcaaaatgatcttgggcttaagatcggccgagcagatcgcattattacagctgaaaaatctgatgcatatgatatgaagtatcttgaatgtaaaaatgatgatcctgttttatgtattcagcaaaaggcattccttgaagacggacgaccttttgaaatttctgagtcacgtaatcgctatgaccgtggtgatttaacagttaatggcaaataagtgttacttgattaaaaaaatcaattatggcaaaatggctctcgtaagcgttttcaattacatacaagaaagtgaggaaaaatttaatgtattcagcaaaaatgcctaaaaactttttatggggtggtgcagttgctgcccaccaacttgaaggtgcttggaaagaaggaggaaaaggtacttctgttgctgatgtaatgaccgttggttcagctactaggccacgtgaaattactgacggtgttcttgaaggcaaaaattatcccaatcactcagccattgatttttatcatcactacaaagaagacattaaattaatggctgaaatgggcttcaaggcttttagaacttcaattgcctggacaagaatctttcctaatggtgatgaagccgaacctaacgaggaaggtttaaagttctatgacgatttatttgatacttgtcatgaatacggcattgaacccgttattaccctctcccactttgaaatgccttttaatttagctaaaaactatggtggttttaccaaccgaaaggtaatcgatttcttcgttcgttttgcagaagtttgcttcaaacgctacaagaataaagttaagtactggatgacctttaacgaaattgataatcagtctgcattcaataatgatttcttgatggctactaactcaggcattttgttcaaagatggcatgactgacagagataaagaagccgccatgtatcaagcaggtcactatgaattggttgcttcagccttagctgttaagattggtcacaagattaatcctgatttccaaatcggttgtatgattaactactcacctgtacgtccgctcactccatcaagtgatgatgtccttttagctgataaatgggagcaacgccgtgactggttctcagatgtacatgtttttggtgaatatccaaatgcagttgaatcctacattgaacgaaatggctatcgtcctgatataactgatgaagataaaattgtcctaaaggaaggcaccgttgactacgttggcttctcctactatcagactactaccgtttctagcgaaaaagttaaacctgatgaattaactgatttggctaaagctgttgctaagaatccaaccttaaagcgtagcgattggggctgggaaattgacccagaaggcttaagaattgcattaaatcaattgcaagaccgttatcataaaccattattcatcgttgaaaatggtcttggagcttacgataaagttgaaactgatgggtcaattcacgatgactacagaattgactacttaagaaaccatatttcagaaatggaaaaggcagttgaactcgatggagttaacttaatgggctacttaccatggggctgtattgaccttgtttctgcaggtactggtcaaatggataagcgctacggctttatctacgttgataaaaacgatgctggtgaaggtacattggctcgttcacgtaaggactcattcttctggtacaagaaagttatcgaatctaacggtcaagacttagattaattaaactattaatagcaaaaaactgatattcagactttaatcattgaatatcagttttttattttataaatatttactgccttctttaatactcaatttagctaaatgctctcgatgcagttcaatgaagttacgcacccaatctggattggtcttagagtaatcacgcaaagcccagccaattgccttgttgataaaaaactcctgactatcaagattattttcaataattttttgtaataacgcggtgttcatcttctttttacgcaataattgatgctcaatcgcgacccttcttacccagaaatctggatcttgcgaccacttgagcattagatcgtctactcgattatccgttaagccaacatagccataaattttgattaatgagtcaatcgtatcccaccattgctttgttctaacaaaacgctcaattttagctaaatcatcaaaaacaatatactttttcattgccaataaataatcacaggcaaaatattgcaattcgcgttgttcttcatcccatgcctggtctagcaacttccagtcaacttcttttttcttcttttcatctttcaaaaaattatgataaatcgccctacgttctggtgtttgtaggccatagaatagaaattgattttgcatgtaaccaacaagatgattggccttttcttcatttgcccgagcgctaaattctttttttaatgtttcaatattcatgttttttattttagcacaaaaagaggtctccaaattctagagacgcttatcgtaaaaataatcatctacccgatcatttcaactaaaagcttggtagaataaaagtatctatattaagaaaggcataaacaatgaaacaaatttattttaaccatgatggtaatatcgatgatttagtatcttatctgctcttactacaagcaccagatatcaaacttttaggtgttggtgcaattgatgcagacggctacattgatcctagtgttgaagcatgtcgcaaaatgaccgatctttttaacttacgtggtgatgatttgactattgctcgttccaactcacgtgcagtcaaccaatttcctcacgagtggcggatggcaacttattcatttaattatcttcccatgctcaatgaaagtggcaagattaatacgcagaaggcaaaacttcctgctcatttagacatggtcgaaaaaattaaagaagcagacgagcctatcgctttagttatgacaggtccgttaactgacctggctcgcgctttagatgtcgatcccgacattgagaaaaacattgaaaaactttattggatgggtggttctcttgatgggcacggcaacgttgctatggttaacgctgacggtagtcaagaatggaactcgttttgggatccatacgcagttaaacgcgtatttgaatcaaatattccaattcagatggtgggattagaaagtacggaagaattaccacttaacgatgagttgcgtcagcactgggcaagtttacgtaaatatcctgcaatggacttgataggacaaggctatagtctaatcgtatctataccatcagccgaactctacctttgggatgtgctaactacaatcagcgcactatatccagaagttgttgaaaccgaaacggctaaagcaagagtcatcactgatgggttaagtgcaggaagctttgtacgggatcctaaaggaagagaagtaactcttgttactaaagccaataaggatctcttcttccaaaagatggatgaaattttagaaagaaaataacaaaaaagaggctcacgcctcttttttatattgccttaattgactttttgtaaagaattaccgcaatccaaactgaaatgaatgatggcagtatcgcaactacaaacaaatttggatctaaaaaattacctactctgatgaagtttgtaattgaagtaatatgttttatgttactaaatatcgcttgataaactgtaacatatattaacgaccactgaatataatattctaccaaagtgagtgtagttgtcgaaaacttaaaaattttgctagccagtcgcatcccccaataaacaaaaacacctgaaagtacaacaaatgctgctaacagcaaaaacaagtttcccaaattaacatggtcccattgactcatgatcaaatacgcaattaccatgaaaattaagaaattaattgttgaacaacacagctgaatgacaaataaaattgcagcctttaagaattcaaacttgtgctctgatctgaataacaaaaatactactagaataattacagcaatgatgaaatatgtagtaacgtgcacagttatctcctactttgcctgttttaaggcttcgcttgtagcctctttaaccccattggaagtaaatgttgcaccagtaacagcgtcgatatgagcagattgtttatccaaaatttcctgctttaatgttttttctgctttttgaccatactgaggcgtttccgtagataaatctaaatctacagttgaaattttattatcagctacagttaatgtcacacctacaaagcctgccatgccgcgtgcacgggcactatatgttccttcttttaacgtcctttttcctcttttttataaaacaaaaatactgctatataataaatataacagtattcctaaaaaaagccacaaagatattgtgtttagtatatcatattgatatactatttcttgggtcttgattgtttttataagtccttattatgacccatgtgcaggtagtagaatccccttctacctgttttattataccacaataaataactgatgttatatcaaatcctaagttcttttgaaaattttctcaaaagggcttttttcttgcactatcctttataagttacgttaaaattgaaatggaattataaagttatatttaaagaaggtaaagcatgtatccagataataatattcttacatatttaaaatggcgtggtgacgttgacttctcaacatcgccttttaatgatattgatgcacttgttttatctattttttcttatcttgaattaccaggtattgttaaaagtaacggaacgacaattagtttagaaaaggctgccaagctctattttgcagatgatcatcctcgttatgataatttgcaataccaagaactatttaaattaatggctcatgcagaccgctttaaaaatgcaaaactgtcgtattttattagtacgttaactgaacatactcaatttagtgcaatcaaaattgaactaactgatgggaccaactttattgcttttcgtgggactgacgattcactaattggctggaaagaagattttgaaattagttttaaaatcactgtagcccaacaacaagcagtaaaattgctcgaaactattctcaaagctgatgatcaagattattacttaggcggtcactcaaaaggtggcaatttagctgaatatgctgccattaatattgagcccaaattaagaaaaagaatcaaacgtatttatacctttgattcacctggaattgcagaagaaattggtgctcagctccctaataagtatttgcaaaatactctacgccgctttgtgccagactttagcgtcatcggtcgcttatttgagtcgaaaaatattccagccactattgttgatagtactcgcaagggactaagccaacacgatgctttttcctggcaaataatcggttctaacttcgacaccagacgccaccgcaatgctcaatctcaagtatataatcaactaatcaatcaatggattggtaacgccaccctagaagaacgtgagtctttaactaatgacctcttctctgctttaagctctagcggcgcaactaagatcaacgaacttgataaaaatggttttggcggttttggtgcaattttgttttcactggctgattcatctcggcgaacccgtttcgtctttggttcattattttccagcatttggcagacgatcaagagccagcaactgaccaaagcgcttttctcaacagacacaattgttggttgggtgctggtagtattaggaatcattagtctaactctaccccaatatgcagtgcgcgcttttggcgccctagttgccttcacggggattggtttcagtgttcaccaaattttaacaacggcaaaatctagtctaaaagaccgacaaaaaaacttctttattatttcgtatttagtagtttttgctttatcaaccgcgttaatttctaataaccgtctactaattttcttagctcactacttcttaggactattcttaattatctattcctacattcgaattaggcaactagtctttcgtaaattacccggaatttttcagactactattgtagcgatcgaggcattaattgcttttgctttaggaattatcgtagtggttaaccctagtgcctttaatcggagagcaattattattatcggtattttgctaattgcttacggcttcttcaagttagttggcgaattatttggccagcgcagcaaaatgcccaaaaatcatcgttaaaaaaagcttgttaacttcaatatcagttaacaagcttttttcttagcccttaataaaggtattagcctttatatgctttaaaatgttatacccgattgcacgaatatgatttttactaccataagtttgattcaaaaacattacaattccattctgattatcagtagtcaattgcatccagttaacaaagtgggtatcaccaaaattgccataagcgacttttaaagtttgattctttttcagataaaaaccacctgagtaagtattaaccttagaacttaaatgaccaagataatggaactattttttagtcagaatcttgccattttgcataccagattggattttataataatcattagccgttgaaaatagattcccagcaccaggcaattgagaaacaacattacgattagcataggcactagcactgtaatttttaccaccagaataaagatatgaaatcgcatcagtctttgaccgcggaatttgttgataaatataggtttgcttcaaattcaatgatcgaataacccgctgtttcacattagcagcataagactttcccgttactttactgataatgcctgccagcaaaacatagttagcattattgtaattaaatttactgcgtcccgtattttctcgtgcattggcttgggcaattgtccaattgatcgcgccattttcagaaaaattaactccatgattagattctgttccaattacgttaattcctgaggtatgtgtcattaactgccccaccgtaatttggtttgcatgcttcaaatttggataccagcgtgaaatcttagtattctgattgaatttcttctggtagattaactgtgtaattattgcagcagtaaccatcttttgcaaagaaccaactggataaagcaattttgtattgccatttttcagtcgtttgctgtaataaccgtagcctaagctaacacgttgagcatgcccattttttacaatttcaatgcttcctcgtaaatgatgctttttcatcatcttaagcgtatattgccgtagttgcttatttgaataactcttcgcctgcacagcatgatttgacattatcaaacacgatgaacaaaataaaatgaaagctatcccgaacttttttagtgtcttcaaaatttcaatctccttttaatcctgaactattctaccacaatcaaaaagcgcaaaatcacttttaatcatggtttgcgctttcatttttattttttaaaatttttatagtaagttcatcttaactaggtattccgcattttcaaccgtattccatgcagcacccttaagcaaattatcggctacaatccacatgttgaaggcacccttattttcataatcagggcgaatgcggccaacaaaagtttctcgcttacctgttgcattaattggttgcggataaatttgatgtttaatatcatcttccaaaacattacctggaaaggcagcaactgcatctttaatatcttgtgccgttgcagtctcatcttcaagagtaaagtagacactttccccatgagaaattggcacaggaaccctaacacaagttgcagttaccttgatatctttggcattcatgtcatttagcatgatcttctttgtttcatgaatcatcttccattcttcatgagaatagccactatcttctaaaacatcaatttgaggtaacaaattaaaggctaatgggtaatgctttttgtctcctttagtaggtaaagtatgagcgtctgcttgcatgtctttaccatcaaggtagtcttgactttccttttttaattcatcaattgctgcttgtcctgctcctgaagcagcttgataagtggaaacgataatttgtttcaaaccaaattttcttcgaactggttccaaagccattaccatttgaattgttgaacaatttggattggcaatgatgccgtgatgctttttcaatgcttctggattaacttcaggtacaaccagtggtacatctggttccattctaaatgctgatgtattatcaacacagacagcaccacgcttaacggcttccggcagaaacttctttgacactgcaccaccagctgaggaaagtactaaatctacaccatcaaatgattctggtgtagtttcttcaactttcaaatcttgatccttaaattttaaaactgtacctgctgaacgtgaggatgcgagtagctttaagcttttaactggaatcgttgattgttccaattgttcgatcattcttcttcccacggcaccagtagcacctagaattgcaacattatattctttcaccattatttttctcctcgcaaaaaattcttcattctttccatcgcttcatgtagattttcatcactggaagcatatgacattctaacgtacccttctccaccaggaccaaaagcactacctggagtaataccgacttttgcttcaaatgctaaatccagtgcaaattgcatatcatttttaccatatttagctggaatcttagcgaaaatataaaatgctccctgtggtttaactgcttgcatccccatcttagctaattcatccaacacaaaatcgcgccttctttgatatattttgcggtatttttctggatcatccaatccatgctccaaagcttcagtcgctgcagcttgagaagagtcagttgtagtcgtaaccattaaaccatggactttaccaatttgttccataatttttgccggaccagctacataacccagtcggtatcctgtcattgcatgtgacttagataatccagaaatataaattgcccgttcaggaatcacacttgcaattgaaaaatgcttaacgccataagttaaagtactgtaaatttcatcagtaattacgtacagattgtgtgcttttatcacttcagctaatgccctaatttcgctttcggtgtattcaactcctgtcggattaactgggtagtttaagataaccgccttgatattagattcttccttaagtgtactttctaatctttctggcgttaatttaaagttatcttctgacgtgttcattaatacataatctgcatctgctaaagttgcaactggccaatatagtgaaaataccggtgtaggaatagcaaccttatcaccccgattggtaattgaaaatagtgtcgcattaattgcttcagttgcgccaactgtaaccacaatttcagtttctggatcgtaaactactccagttgcttttttcaaataattgctaattgcttgcctaagttccaattttcccttttgtggcgcatagtgtgaatcattatttcgaatactttcaattgcagctgttttaacatgctcaggtgtattcatatcaggctcacccaaagtcagcttgataattccaggaatggttgaaactttattatcaaaaatcctaatccccgaagccttaacagattgaatcttcttacttaaagctaagtcatttgctaattctggcataatttttcctcttataaaatattctctaagccaataactagttcagttaattgatctactttttctaaagcaactttaaccccactcataaaggaatcacgatcaaatgaatcctgtctaatggttaaagcttcgccaggtccaccaaataaaacttgctcatgtgcaatataaccaggtaagcgtactgaatggattttaattccttgataatctccaccgcgaacattggctaaagtctcagtttcatcaggcgcagtttgatgttcaggacgattttgcgcgatcatttttgcagtagctaaagcagtgcctgaaggtgcatcttttttatctgcatgatgcatttcaataatttcaacatcagggaaatacttagcagcttcttcagcaaacttcattaataaaactgccgacattccaaaattaggtgcgattaagccacctaatttttcctttttggctagttcaatcaaagttgcttcttgatcatcactcaagccagtagttcccacaataggtttaatttgatgcgttaaagcaaaataaacattgtcatagacagctgcgggagtagtaaaatcaatccaaatatctgcagcatggtcaggaatttgacttaattggttaaaaatttgggctgttttaggtaaatgatatctttcaggctcatttactgcctttggagcaaatccagccaccaattcaaaattgggcagctgattaactaaactaacagccttttgccccattgcgccagtaaacccagctattagtacttttttaggcatctcgtcttaccaatcctttcctaaattaagtggcaacttttgcatcaatgcattagcatttaaacctaaatgctgggccaacttttctttttcctcatcacctaaagcgactaatggcaaacgacatccccctactataaatccttgagcattcaaggctgccttaacaggagctggtgaaggatacataaacaaagcctgcattttcggcgttaaccagcgttgaatcgtgcccgcctcaggataatttccttcataaagatcatcaaacattcgccgcatttgtttgcaatataaatggctagctacggaaataacgccattggctcctagtaatcttgcaggtaacgcttgcgtatcttcaccactaaataccaaaaaattaggatctttatgatcaataatgtattccatttcttctaaagatgcacattgtttgattcccttaatatttttaaggcgtgataattggactaccgtttctttttccatttttacgccagttctaccgggaatgttataaatcataattggcattttagtctgagcattaacagcactaaaatgtacaatcatgctacgctgatcaggcttattgtacggtggcactactactaaggcataatcaattcctttaatctgtgctacctcattggtgaaggcgatagtggttgcagtgtcgttactgcccgttcctgcaataaccggaacacgtccattaacaatttgaccaaaatgctggtacaagtctatcttttcatcatgagtcagagttggcgtttctccggtcgtaccaccaactacaaagccattgcaaccttggtcaattaaataattaaccagcttttctaaactagcaaaatctattttttgattctcatcaaatggcgtaacaatcgccgttaacaaatctgcatcaattaatgttgccattttattgcctcattctattaatcaaaaatcctttgattgcatcaacgccgcgctgaatgcttttctcatcaggattaagtgtagccgtatgcaattgtgaatcaggatcaccaacccctagccaaaacattgttccagggaatttagccagcaaaaagccaaaatcttcacccgtcatttttggttcagtagtaataaagttaaccgtcggctggcttttcatatatgaaataaagttcttggttaattgtgggttattttctactggccaatatccaccttgattcaagtctaacttcacttctacaccaaagcttttctcaataccaagacagatttctttgagacgttgatcgattgtcaaaatcatattttgagttaagccacgaatcgtgccctcaattctagcttgaccagcaattacatttctaatcgtaccagcttcgattttgcctagagtaataacaccactttgaattggatctatgcttcgtgaaataatagtttgaacctgcatgatcaaacttgctgctgcaactaccgtatcatttgcatcttgcggaaaagctgcgtgtccacttttacctagaatatcaatattgacttcagttgtaccagcaaaaagtgtacccatccgacacccaatgctaccagcaggcaaagcggggttatcatgcaagccatagaactcgtcaggtttaaattgatcatgaaaaattcttttttcataagcttgcatcccaccactttggctttcctcggctggctgaaagaaaaaaagcaaattatcttgtggctgattttcactaaaatagcttaacaaacctaatgccacggtcatatgaatatcatgtccacatgcatgcattactccctcatgttttgatgaaaatgccagtccagttttttcagtaactggtaaagcatcgatatcagcacgatatcctatcgttctgtgtggttttcttcctttaactaatactagaattgcggtaggcagtgtcgacggtatctcaacttccaaataatcttgcttaaatttttgaattacctcgattaaataatcatgtgtttctttttctgctagtgctaattcaggtatttgatgtaaatgccttctaatttgaattaactcactttcacttaaaactgacattttataactttctcagattatcttctagttccgtcttactactagttttttcatcaacttttttaataattttagcaggaacgcccgctaccatcgtatgtgctggcacatcatgagtaactactgctccggctgcaataacggctccttcacctacatgaacaccctcaatcacaacagcattagccccaatcatgacattatcatcaatttgaaccggtttagctgaagcaggctcaattacaccagccaatacgctaccagctccaatatgacaatgttgtccaacaatggcacggccaccgagaactacgcccatatcaatcatggtattagccccgatttctgctccaatattaataatggcacccatcataattactgcattattaccgattaccacttgatcacgaataatagctcctggttcaattcgagcattaacttttttgaagtccaataaaggaactgctgaatttcgtgcatcattttcaatatggtaggccgtaatttgatgattttcttttaaaaatggttcaatatctttccagtcaccaaagatcgcgccagaatgagcttcagtaaaattctcaatttcctttggaaaatcaatttgtgctaaatctcctttaataaagacttttaccggtgtcttttttggtgcattaccaatgtaatcaataatactttttgcatctaactttgccatcttttttctcttttctaatttaaatatgattgatctaaatgaaccaagtcttctaaactttcacgcttaatgactaattttgctttaccattttctgcaaataccactgctggtcgaggattacgattataatttgaagccattgaatacccatatgcacctgtatccaacatcgctaacaagtctccagctttgacttgtggcaaagcttgatcttctgctaatatatcgccactctcgcaatacttaccagcaatacgaacatgttcagtcaaaggcgcttgtggatcggtggctaaaactgtttcatacttagcctgataaagtgcagggcgaatattatctcccatcccgccatcgacagtaatataagaacgataacctggaatatccttacggctacccaccgtataaaggttgtaaccggctggaccaacaattgatcttcccggttcaatatcgatttcaggtaaaggataattcattttttcagcttcagttttgatcaccttaacaatcgtcttaacaaattcttctggtcgtaatggatgatcttcttgggtatatttaatcccaaaaccgccaccaacattaataacttgtgcaagatagccatacttttctcgccaatcttgcgctactaccattaatttttgtgctcccatttcaaagccgtttaaggcaaaaatctgtgagccaatgtgagcatgaatccccaacattttcatcctaggattagctagaacttgttttaatgccttttctgcttgacctgattcaagatcaaagccaaatttactatcaatctgacctgtttgatcatattcatgggtatgtgctgaaatccctggtgcaatacgcaacatgacactaatcgtagcatcgtacttttttaaaacttgcgccaataactgaatctcatgaaaattatcaataataattttgccaacatgattttttacagccatttccaattcagttaatgatttattattaccatgaaagctaactctctccattggaaaattggcttttattgcagtaaataactcacctgctgaaactacgtcagtgtatgctccctcttctgcaataacttgatacattgcgattgctgcgaaagctttacttgcataactaacagcataggccatgttttcttcttcaaaaactttcttaaaagcccgaatttgtcgacgaatttgatcgacatcataaactactaatggcgtaccatacttttgagctaattctactatatcaactccaccaatcgttaaatggccttgctcattaatctgatctactgcaatttgtgaattcattttgttctcctgtctttttcaggcgaaacgctaataaaaaatccattgtctgcgccaaacaaacaatggattaatttctacttaatctatggtcgatagcgctccgcgaattttgttcgcgacagtccgcagtttattcaactacgccccagctcaagcctttagcatgactcagcttcggcaacctccccttttacaattcatcttcgttttgcccaactcagaattgttacttatgtcggctgcgcctcttcgattgactgtagtttacaattttataaaaacatagtcaacaaatttattataaaaatttaattttatttgtaacaatgcggcatttagagtgataaattacagtcatcacttgcaagattaaaaaataatgttagaattcaattaaatttagtctgacttttttatttaaattaatgatttctgaaaacaaaaggagttttgaaatgaaaatcgtaaagtttggtggctcttctttagctaccggtgaaagtgttgcacaagcaattcaaattattctcagcgatcctcaacgacaagtaatggttgtctctgccccaggcaaaaggaatacaacagatatcaaagttactgatctgttaatcaagtacgcagatttagccttaaagcacaagaattgtgttgaaatcgtgaataaaatttttagtcgctatcaagaaattggtcattattttggcttagctgatacggaattaagtattattaaacaaattttattagagttgcccaatcagggttatcctaacgaaaaatatcttttagctgcatttaaggcacatggtgaacggcttaatgctcgtttaattactttaattttacgccatcaaggaattaatagtcgttttcttgatccggctgaagccggtttaatcgtgactggcgagcccaatgatgccattgtcaatccagagagctacttaaatcttgaccaaattaaaattaaggctgatgaacgtatcgtatttcctggcttttttggcatgactccgtctggtaatatcgccactttttcccgtggcgggtcagacattaccggggctattctagctcgcggctttcatgctgatctctatgaaaattttacagatgtcaatgggatttttgccgctaatcctcatattattgagcatccccaatccatcaagaaaatgacttatcgcgaaatgcgagagttgtcatatgctggcttttctgtttttcacgatgaagcattgattcctgctattcaaggacagattcctatcaatgtgaaaaatactcatgatcctagcaatcctggcactatgattgtcccagaaaaggattttgtcccagataatgcaataaccggcgtaaccagccaaaaacatttttccgcattatatttgcataaatatttgctcaataaagaagctggtttcaccttacgtatattacaaattttataccaacataatattccatatgagcatatgccatctgggattgacgatattaccattatttttaacaatgattttctaaacgatcagttaattgatcaaatttgtaatgaaattcaagctacaattaatccagatcaactcgaatggattgaagattatgcaattattatggttgtcggcgaaggaatgcgacaaaaacataccatcagccgtcaaattatcgattctttaggcgatcatgatatttcaccacaaatgatcaatcagggagcttctcaaatttcaatcatgatcggtactaaaaaagaaaaggctgatgaagcagtaaaaattatttatcaaaagttttttaattagggggcattatgattaatttattcaaagttcacggttcgcaaaatcatttctttattcttgatcaaacacaattcgaacacgaattaagtgacgccgagctaaaaaattttacgcaaaagattaccaatccacaaactggactgcttcacggagcagatggcgttttagtagttaatcatcccgtgcattctaactcacttggccagatgcgtgtaatcaatgctgatggaagtgaagcatcaatgtgtggcaacggtctacgcaccgttgctcgttacctaagtgaaaaaacgggaaaagataatttcctagttgacacaatgaatgccagcttacgtgttagaagagaaaaagattttgcttctaacgtgccagcatttgcagttgagatctctcctgtacgctttaataaagaggcactcccttttgataatttaggacaagaacggattattgatgcttggttgccagaaatttatcctggattacgttttacttcaattgccgtacctaacccacatttaatttcttttgttaatcaagcagaaattaccggcccgatcttaggcattgttggtaaaaaattaaatagcaataatccctactttacagatggcgtcaatgttaatttcgcgcaaattttagataaaaataaactttttgtccgcacttacgaacggggcgttggttttaccaatgcctgtggtactggaatgtccgcgacttctcttgctcttactttaacccaccccgaaataggcaacttaaatacaccaatatcagtttataatcctggcggtatggttaaaactatcgtgcattatgaaaaaaatagttattggatcgagcttattggtaacgctacttttactcatcgaattaagctttctgaagctgacttaaggaaaggtgatttttccaatgtccagatccaaaagactgctgaacaaagtgcttatgaaaaatttattgctaatctgccaaagttcaatgacattacaactttagcgtaaaaaaatggcttgcaacacgcaagccatttttactttttaattattaatctaagtctttcaagccatgctttttcttggaaacgcgataagctactaaaccaaagaaaattggaccaaagcttgtccaaaaagcagttgcatatctatgctccaaaactggttgcaaaaccgtaaatataattccggtgcaaacaatcagctcaacaaagactactaacgcaaccgtccatttatagttagtaaacactctaaacttgcgcggataatcttttttaagaaagaatggaaatgcaccgatcaagaaaatataaggtgcagtagcggctacgttacccatatccgtcagaatttgataaaagctagtcgctgcgctaccaccgaatgagaccaccgcaattaataggcaaacgaagacagtttgagcccacatcgcattagcaggaataccgtgtttatttaatttagtcgctgccttaggccataaacgtggatcagatcccatgatgaaggatttaattggtgaataaagcaaaacaaagagagcacctgtcattcccatcaaaccagataaagcaattgctctagtaaagaatttaccaatcaataaactcgtgttaggatccaaatgaagtgcggttccaaaggctttgccaagtgtgccatatacggtatacgtaatatttccagtattggcattggctgctaaaatatctttttgataattaactgaaaagccggtcataaaaatcatcaaaacataagaaataatagtgaacaatgacccaataattaagcctttagggaaatctttttctgggtgtttcatactgtcaatcacaccaccgacggtttccatcccaccatatgcaaagactgcataaactacgaaagaaataatcgtaattggcgtttgaaaacttttattaggcgaaataataaaactttgccacccagtaatcggctgagccaattgcccatgattcataatcaagaccgttaaactagctagaataaagactgcattcattacaatcatgaaccaaccaccgattgatgacataattttaattccagttatccctctggaagacaggtacgttgatacaatcatgaataaaattgctagtacacctatcaattgagtaccatgcaagcccaaaatattccattcttgagttgtatctttgccaaaaataagggcagagattgaaatccaaagccttgaggcgcttgcaaccagccacagcacccagttagccagccatacaaaagtcccaataaaggcctatttttgtccaactgagccagctaaccatgaataaataccaccttgagcatcatgaaaagcagacccatattctgccatcattaagccagctgggaaaaagaaacagacgccagccaaaataaaccaaatgatcccagcatatgtcatttgctcataagaaacagaaacattgccaaaaccataaaccgttgtgataatcatcaacacaaggctcatagtcgtcaatgattttttagtttgtgaattttcatcatccaagataaagcctctactttctatttacactttccattttagcatcgtttatcttgaataaatttattctaattttaggctcataagaaaaaactactagttattcactagtagcccttcatttttattcattaattcttttttcaatccaattacttaattcagttacatgtaatttagtgaccgaactaaaagtcaaaacggtgacatgatcatagttgagattcaactttttctttaagcctgacatcaccttattagtttgactcttttttattttatccatcttggtacaaactaccaaaattgggatatttagatattgagcataatcatacatagcaatatcatctttggttggttcatgacgactatctactaagataattagtccctttaggttgggtctagtttctaaataatcttgaatcatttcgccaaattcttgccgcttcttctgtgaaactttggcatagccataacctggtacatcaaccaaataaaatttttcattgactttgtagaaattcaaagtttgtgtctttccaggctgtgacgaggtcctagctaagtttttacgctttaatagggtatttatcaagctggactttcccacgtttgagcggcctgctaatgcgatctcaggcaagttatctttaggatattgatcttctctaacagcactaactgcataactactgctttcaatgatcattgacacttacctgttctttattatcagtatttttgcggattacctttggcttagcgtgcttagtaattacgtccttagttacttcaacggtctcaatatcctcttcactaggagtttcatacataatatccataattgaattttcgataattgttctaagtccacgtgcacccatatttctttggattgctaagtcagcaattgccttcagagcaccatcagtaaacttcaaattaacatcatcaagtgataacaacttcttatactgcttaactaaagcattctttggttcagttagcactctgaccaaatccttactactcaatttatcaagcgtagtaataattggaattctaccaatgaattcaggaatcattccaaatttaactaagtcagctgtagtcaaatggcgtgtccaatcatctgcattaattttatctgcctcattttcagcaccaaagccaatggtctttttacctaaacgatttttaacgatttgttcaattccgtcgaatgccccaccaacaataaatagaatgttagtcgtgtccatcttaatcatttcttgttgagggtgtttacgcccaccttgaggtggaacagaggcaattgtaccttccaagatctttaataatgattgctgtacaccttcacctgaaacatcacgcgtaattgagacattctcagattttttagaaattttatcaatttcatcaatataaataatgccacgctgtgcacgttccaaatcataatcagcattttgtagtaacttaagcaaaatattttcaacgtcttcaccaacataccctgcttcagtcaaggtagttgcatcggcaattgcaaatgggacatttaaaatacgagccaaagtctgagcaagatatgtcttacctgatccagttggtccgatcattgcaatatttgatttttgtaattcagttgaagaatcaacatccatttggctaattctcttatagtgattatatacagcaactgataagacttttttagcacggtcttgaccaataacatattgatcaagttccttttttatttcaacaggcttaggtaattcacgagctgctttaagtgaatctgctcgtaattcatcgtcaataatttttttagccaagtcaacacattcattacaaatatatacaccgttaccggcaatcattttcttaacttggtcttgagttttgccacaaaaagcgcatttaatctcttcttgatctgtaaactgatttgccattatttttcctcctatatctaccaaaaatcagattatcataaattaactaatattgataaatattaagctcgaacagcaaaaaaagcggcctatagccgctctttttgagaaattagcaaatattactattacttgctttccttcttgtcatcgtcttctttgttttcaagctttgacttagcaacttgcttagcattatcagtaataagatccatagccttacgtacagtaatgtcgtggcctaacatgtcatctgataaggtgttacgtaccatcttttcatccatgttgtattctgaagcaagatccttgatttctttatcaatttcttccttagttgccttaaggtcttcagcagcaacaatagcttcaagaactaagttagttttaactctttcagctgcattcttttcaaattgtgaacgcaattgttgttcgttggtattagtcaacttgtagtaagtttgtgggtcaataccttgacgttgcatattacccaagtattggttcaattgagtatcaacatcttcttgaatcatagcatcaggaatttcatcgatagtagcgttgcttacagcaccttcaattgcagcttcttgaatagcgtcgtttgcttgttgttccttttgttccttcaagtccttcttgatcttttcctttaagtcatcaagggtgtctacagagtcatcaacgtccttagcaaattcatcgtctaacttaggaagttgctttgacttaacttcgtgaatcttagttgcaaagtgtgcttctttaccagctaaatcctttgcaccgtaatcttcagggaaagttacaactacatcaacatcatcgccggcttcatggccttcaagttgatcttcaaagccaggaataaatgcacctgaacctaattcaagtgagtagttttcagctgagccgccttcgaatggcttgtcgtcgatagtacccttgtaatcgatagtaacagtatcgcccttttcagccttacccttcttaagaacaagttctgcattttgttcacggcgcttgtcaagttcagcatcaatgtccttttggtaaacacgagtgttttgcttaagaacttcgatacccttgtagtcacctaacttaacttctggttctacagtaacagtagccttcatagtccaatccttgtccttatccattgatacaggaacaatttgtggttggccaactgctttaatacctgcttctttaacagcagcagaatatgcatttggtaatacaatatttaaggcatcttcatataatgcttcttcaccgtaatattgatcaaagatcacacgtgatacgtgaccctttctaaagccaggaacacgcaagtttttctttactcttctaaaagcttggtctaaacctaatttaatttcatcttgtgaaatatcaaaagtaagatcaccggttgtcttaccggtcttttcccatttaacagacattaattaaatacctccaatgtcaaatttgagtttgcatcttgcatactaagttatcttaccttaaaaggccgcaaaaaacaaatttaaaagaaaaaagatgcgctcctgtgaagaagtgcatctttttttaactatatcgttagaaattagtcaaggatttcagtaacctgaccggcaccaacggtacgaccaccttcacggatggtgaacttagtacccttttcgatggcagctggcttgattaacttaacagtaaattcagtgttatcaccaggcataaccatttcagtaccttctggcaattcaatttcaccagtaatatcagtggtgtggaagtagaattgtggacggtagtctgagaagaatggggtgtgacggccgccttcttccttcttcaagatataaacttgacccttgaattccttgtgggtttgaattgagcctggagcagccaatacttgaccacgaacaacttggtcacggtcaataccacgaagcaatacaccaacgttatcgccggcttcacctaagtcaagagtcttgtggaacatttccaaaccagtaacaactgacttaagaaccttgtctaccaaaccaacgatttcaacttcgtcaccgaccttaacagtaccacggtcaatacgacctgaagcaacagtaccacgaccagtgatagtaaatacgtcttcaactggcattaagaatggcttgtcagtttgacgttctggagttgggatgtattcgtcaacgatgtccatcaacttaagaatttgttcttgagcttccttgtcgccttgtaaagccttcaaagctgaaccacgaacaactggaatatcgtcaccagggtaatcgtattcagtcaacaagtcacgaacttccatttcaactaagtcgatcaattctgggtcgtcaactaaatcacacttgtttaagaaaacaacgatgtagttaacaccaacttgacgagcaagcaaaatgtgttcacgagtttgtggcataggaccatcagttgcagcaacaactaagatagcaccatccatttgtgcagcaccggtaatcatgttcttgatgtagtcggcgtggcctggagcgtccatgtgagcgtagtgacgattttcagtttcgtattctacgtgggcggtattaatagtaataccacgttccttttcttctggtgcagcatcgatttgtgagtaatcttcagccttagccaaacccttgtcagccaaaacagtagtaatagccgcagttaaagtggtcttaccgtggtcaacgtgaccgatagtaccaatgtttacgtgtggcttagttctaacgtaatgttctttttctgccattaaaatgaccctcctgtaaatttgcaagaagtccgttgagataagttaacggataattctctgttgaatattgtactactttcttcggcaaatgcctagtaaaaaagcttaagcgaaattgcctaacgaaaatatcctttgctaattatactaaatagtttgaaaatgtaaaccttttttacttattttttattgcggtaagtatttatatacgcgtggtgctagttaaatcgttctagacaatatgtcatattataagctaaaatagctatttctagccgttgttgaaaacctactaagctcctggctcgattattctcagcattgtaatagctaagcaaagaaaagtcgctttcgattgttcttctaattgccattaactgatgatcattatgctttttagcacccctcatgtttttacgatatggtgtccaaagcacgtatcccatacgctttagcttggctgctaagtcttttcctaaatagccttcatctcctaaaagataatggttaattggatgagcattgatcatcaattctaccgtctcttttgcatcatgtaccgacgccttagtaactgcgtagtcaagcagatagccatcatcactcactattgcgtggactttgaagccataatagtagatttttttcgtcgctttataaccaatatcggctatgccacggaagatcttaacgtgataattgcgaacaggctgacaaactggaatcggaaaactgtcgataatcaataattctccacctacctttacttcctgattccaaccctgacggatacaacgaattagaggcaagagcattcgagctcgacggttaaaacgagaatgagataagccaacgaagaatttacagaatcttcgttgagattcaattccaatttcagtttgccaaatgagcatcgctaagatagaactatcaggaagcttggtctgatcaacatttttacgatgtttaagtccatcaggcgcataaagcttatacagcgagcgacaaatcacatttaaccgattaaaactaacttgtaaatggtgagaaaaacgattaagcttgagatagttcaattagatcagactcttttctatttaaattacttacaacttgagtctagtctaattggacttttttattaactaaaacgatttaactagcaccacgcgtatttatatattttttctagtaatttttgatgactacggccatcttttctttgtaaaaatgagactaaatcactagcaaaactgtcaggctcatcaatatattggttaattttagggtaaagactgcctaataccaaattcacttctcccagcattaatggcaactgacttggactattgtgaaatttgcttccaatgctagaaataatttcacggtacttaggttctttttctagaagcagtgtattcgccggaataaagctctccatctggcctattacccaaatttcaaacttttcttcaagtcccaagcgaactaagtcttcacaaagtgacaacctaacagcaaaatctggcgttggatctaataagacgcttcgtgcaaaagctttaaaattaggcaggtttaacttatgtaaactttcataatccgactgagtaacctgttctcgttgtttaaagttttgcataatctgccgctgtttttcttcagaagctggttttaccttttctgataagtccaccccaacaagattttttagttgtagagcttcaataaaaaaattatttttagctagaatttgacagtaacttttaaatactcgctgatcagaaaaaagatcaggctcctctttaattaaagcatatgcctgatcttcttgtttattagcgcaatagagtttgcagagtttcaaaataacgtccaatgaatgctcttcacgtaatgcttcttctagattttgaatagctgcttcgagatctcccttacgctcatcttcttcagcaagtttcaataaattttgttggcttactgatgtcatttttagtctttcttattactttcttttttcttatttatttttttattttcgtctttggcatggttcttattgtcattttgtgctttttcattgcgtttctgcatagcacgatgacggttttgatttacttccatgaccacgggcaagatcactggacgacggttagttttcttgtataaaaacttctccaaatcaccgcggatatcttgcttcaattcagtccaatcaaactttttgtgttcaaaattggcctgaattgcttttttaattacatcaattgaatcactcatcaactggcgattagccttgatatagacgaaaccacgactagtgacttttggctctgcaataatctttttcttcttacggtcaattgtaacaaccgcaataaagattccgtcatctgataggacctcacgatcacgtagcacaatattaccaacatcaccaacaccagaaccgtcgatcatggtatcttcacctggtactgggtcagttaagaagaaacgcttctgcttaaagtcatattcaagacagtcaccattcttggtaatataaatatctttaggattcattccagctttaatagccaaatcacgtactacttcaagtaaacgatattcaccaattactggaattaagaattttggcttcaaggttgtaatcaaaagttgcagatcacgaccagttgcatgcccactagtatgtatatttctgcctaactggataaccgtaccgccagccttatataccaaatcactggtttcagctaccatcgtttcaaccgcatgtgacggagtagttgcaataaagaccaaatcgcccttatgaatcgtaatcatactatgacgcttcttagccattttttgtaatgagttaagtggttcacccatacgcccagtctctaatataactgtctgctcatctggcacagtcttcagatccttaactcgcatcaacaagccttcaggcacatctaaatagcctaatttcattgaagttctaacaatcttagctagatcgcggccagttaataagacgcgtttccctgttgctgctgcagcatttaaaacttcttgaacacgattcaagttagaggctttagcagctacgataattctgcctttagcatttctgaagacattagtcacaaatttaccaatatcttgttcagatgcattagggaaagatgcttctgcattagatgaatcacttaaaagcgctaaaacgcccttttgttcaatttcagctaagcgatccatatcagtccgataatttaacgcagctgttggatcaaatttaaagtcaccagtataaacaatttcacctgctggtgtatgtacatctattccaagtgaatcaggaattgagtgtgtcgtatggaagaatgaaatacttgcattcttaaaatcaatttcagtatctgcatcgattacgtggaacaaactattcttacggcgtttgttttcgcgttgtacttcaattttagcaagttcgatactcaattgtgaaccaaatactggaatatcgtatttacgcaaaatgtatggcaatgcaccaattgaatcagcatgcccatgtgttaaaaagatacctgctactcgatctccgtattgttcaaagaaatcaaggtcaggaattactacatcgataccaaataaagaactatcagggtactttaatccggcatcaagaacaaaaatttcatcattaacttgaacggcaaacatgtctttaccttgttcacgcacaccgctcaagatcataattttgatttgatcagccattatatttccttttctatctaatttttaattcttatggatctatcgatctcaacgtaaaaataatctgtttcaattttagcataaagaataaaattatgacagagacaaaaaaagccagccttttcggctagcttcattattcaatattatgtgaaaattaacgacgaagacctaacttcttgatcaattcacggtaacggttaatgtcgttgttttcaaggtaacgaagcaagttacgacggtgaccgatcttcttaagcaaaccaacgtatgagtggtggtcatgcttgtgactcttcatgtgatcagtcaagttgttgatatcagcagtcaaaagagcaacttgaacttcaacagaaccagtgtcaccttcgtgagttgcgtattccttcataatcttttctttttcagtctttgaaattgccatagttaaattcacctttcattaaataattgccgttaacaacgtttatcgtcggcgtgaacaaataaacagcgttagcggttcacaacagtcataatcatacacattattttttaaaaaagcaagcagaaattaccttgcatccgtgatatttcttaagtataatggatgaagtaaatttctaaatcattggaggtgaatttcatgccacaaatcaaatcagctatcaaacgtgttaaggctcaaaatgctactaacgaacgccgcgcttctgaattaagcaagttaagaactgctatcaagaagtttaagaacgctgttgaaagtgatagtaaggaagacgtctccaagttgcatttagaagctgaacgtgctttggataaggctgcttcaaaaggcttaatccacaagaacaaggctgctcgtgacaagagtcgtttaaacaagttagcaaacaagtaaatcttacttattactaataataaaaagaggagatctgcagtgatctcctctttttgtatactcttagacatttaagataaataatttcaaaaaattatcttctcggtaagttccatttttatatttaaattctaagtcgattgcatcccttaataaattttctagcttgtctatcttcaaccgattacgtagggctaacttaaccctatagggatgaacgcctaattcttttacaatttgtggttcgctacgacctctttgtgctaagatcttaacgaccaaaatcaattctaattgattttcaaagaccgctaataattgaattggattagtcccttcacgtaattgattatctaagcgctcaactgcttcacggtaattcttatctaaagccgactccaaaatagcgaaaatattttgtgctagggacaaatctacattttgcattactgatttttcagtaattttgttatcggtagctaccatttttagcttttgataattgcttaaaatagtgtcaattacctgatcactccgctcaattagcagctgtaaagctgactgtgtgattatatatccctcatctttgatcaaggctttagtcgttgaagcaacttcatagggcctaatttgtggctcaaccacattgaattgctttagaacagttttagtcagttttttacgcctatcaattttttcataagaagcaacaattactactacatcttctaaatcagctaagttttcaaaaatcttttgtaagtcatcaatttgtttctgtaattttttagataccttagctgttaaaaagaaaggatttttgactacaataaatttctgttcactaaataaactggattcagttaagctcgcaatcaattcatctaagccatcgctttcgcaatcgacagtcacgtgctccaaatctttaaagcgatcttccttggcatatgatctcaccaagtaatcattgagaaagtcatctgcaccccaaattaaggtatgtggattattgttatttgtatttttaaacaaagaaagtaaggtcattttttatcccgctttaaaaagtaactaaatctaggactttgcagtccgccataataccagctaatcataccacagtcttgcgttgaaacccatggtatttgctgttgagttagtgtcgttagcgtctcttgatgggggtgcccgaacctattttttcgaccagcagaaataaaaacttgcttaggatggattgcacgtaaaaagtctggattggatgatgttttactgccatgatgacccaatttaaaataatctacctgaagtttcatcctctgcataatttccttttcaccatcttgacctaaatctcctgtaaacaaccaattcttattcgctactctaaaaagcaaactcagggaatcttcattctttccttctcctgcttgatatggataaaccacattaaatgtaatctgcggttctttcacccgcattcctgcaagtaactccaataatttggtatcttttacacgaccatctaatctcttttgaaaagatggattcttaattagtccttcggccataaataatttcttaacattaacctgctctagtaatggtcctaaatcaccaacgtgatcggcatcttgatgcgaaacaaagactccatcaattgtattaattccctgacttttcaaaaatggaatagtaattcgatcaatctgaggtgtctgctttttgccactaaagtttagtttcccaccagtatcaattaaatataccttgcgaggaaatggcgtagtcactagaatactatctccttggcccacatcaatgaaggttacttgccctcgcaaaggaaaatgaatcatgctgaagaaaattacatacaagctcaacaagcccaccataattttcttactattaaagcgccagttaactttttctcttaaagaaacaattaaaataatcgttactattaatagcaacagacactgccaccaattaatttgcccaaaagttagtagtcccaacttagtagcagataattgcccaatgattttctcacctaattcaagcactttttctaataccggagcaaaatctttagtcagaccaaacgtcacaatattgaaaaaagcaattggtaaaactatccaattgaaatatggcactactaacatattaaaaattacagttaaaaaattgacctgataaaagaaaagcaatagtaatggcgttaataaaatatttaacaaaattgcttgtttaaaactgccaaacttatcagttaactgtaaacccaatgccaaaatatagctcaataaggctccagttgccagaaataaacgcggtactactaaaagatgtaaaatgcaggtcaatcccagcagatctatcgacgcaacatgatatttcttaaacttacaaattttgcctaaaaagtaggttaaactagctcttacaaagccggcttgaccattgcttagaaaaatacctagcaataaaaccaatgtacagcagacaaaagtttcttcatccgtcagtttcaagttaaaacaaaatacactaattaacaagacatagattccaacatgtaagcctgaaatgcttaacaagtgaataacacccaaatctcgataattatttagtatttcttgattttcttgagcattattttcacccaagattaattcactagcgaaaaagcctaataactgtggcatcttggcaaaatagttctgcaattcaaaacgtaattgatgcaattgatccccaaaatcagtaatcgataatagcttcatttgacaactactgtatttcaatttttggtaaatctgttttgcctgataataattctgaaaattaaactcaccaatattagttgctggctcaattgaattgcattccccattaatttctgtcactaaaatagggttcccatgcttaagcagttctttttgaacatctgttaccttgccaccaattaaaattttaccttgagcgaaattacccacacctgttaagtagtcgtctttaattcttacctgatcagggtaaattcttaattggctctgctgggttaaaacaaaattggtttttggtttacttaaaaaaatcagtaatagaaatgctccaactattagactaactatttttaaactaactcgatatttttgtactaacagtagcaaaaagtaacccagaaaaaataaagctactattttttgcaccattgttgtacaagaaaaagccaaaaaagagattgtaattagcaacaaagcggttattaagtaaaagccaacttcatttttaaacagccaattgatctttaaggctcgcaaaagttttttctcctattcctgatacctgcattaaatcttctatctttttaaaagaaccattttgttcacgataagcaataatctgttctgccttttttggaccaattccagttaacttttgtagttccgttacattagcagtatttaagttgatcttagtgccatccccttgattacttgggctactgctactagtactcccactattttgactattatcagctgatcctgcagttgccacattttcaaccttttcacccttgtaaggaatatgaattttatcttgatccttaagcaaagtagcgcggttaatagcttttaattgtgctctagcagtagtacctccagccgcctcaattaactcctgcagacgagcaccatttttcaatgtatatactccctgatgcttcaccgcaccggaaatatcacaagttacagtcttagaaacggttgttgaactactgctagtcactgcattagtattagtggttgcacctgaactactagtgctagactgcataacttgatcctgcactgcagcagcattttcttgatgatcccctttcttcaatccataaaatccaactacaagaattattgcaccaatgagatatgcttttttctcaagcacaaattcttttactttttcaaaattcataaaaatcacctctactatttattacgcaaaaaaagcccagaattttttctagacttcaaattttttgaatttttttagtagtgtgtctttagatagtttaatgcatcatcaaaagtgctcacagggacaattttcattttggtgtgaattttctttgcggttctcttagcaaccgcataattagtttcacttttcttcacactggttgaatcagtcggcgcaaagaagacctctgcaccttctctgctagcagctaccacttttttatcaacaccaccaatgattcctacttttccggtaggtgaaatcgtacctgttcccgcaatcttatgtcccttacttaagttctgcttggtaaagacctcatagctttcaagtgtaaacatcaatccggctgaggggccaccgatttcgccagcattaatttttaacttaggcttagttttcacaactacatgctcaactaattgaatcccaattcctggcttattagtaccctttactttaacaattttgccagtaaagtgtttctcttgcttaccacgcaaaactgagattgttactcgtgcaccaatcttttgtttacgcaaataatccatcatctcttcagttgagctgaaacgatgcccgtttgcgcctaaaacggtatcaccaatttggagcttatttttaaaactagaatttttctggacttccattacataaacgcctagatattttaagctatgctggttacctgcttttttagctgcataataaattgcattctgctgacttgtttccatataccagttttgcaactcattatattgagcactagtttgacctcctagcagctccttgcttgatacacgctcatcatacggacgagtaaaactccatagatattgcaaaaccggagccggccgactagttatgctaactgtcaccaaataaaaattattcggacgtttatttgatgacttaataaactggcccacgggcattgcctcaccaggatattcaatataataatcggtcggccaaacagcaagtaccactaataaaacaagcgcaattagtgccaagagccaattacgcaagtgctttttcgattgattgtttttcttattattcatgttttagcttctctctcaatgcaatcgctgcttttttaggtaaaaacagactaacatcttcatcaaaacgagctaattccttaatcatgcttgaagctacaaaagaattttctggactcgtaaaaagcaaaactgtattcacatctggagccaattttttattaatcccagcaatctcctgttcatagcggaaatcagcactgttgcgtacaccgcgcaccataactttagcatgcaattcatgtgctaaatttacagttacttcttccggtctttctagcacttcaatattaggtatttcccttagtgcatccctgattagatcagcacgttcttcaggcgtaaacaagtatttcttagctgtattggtcatcgcaactacatatactttatcaaaaatttcagcagcctttttagcggtctccacatgcccattagtaatcggatcaaaactccctggaaataaagcgattgtcattattagtcctttcgataaatcctcacaattgtttttcctaaatggtgttctttgatcaatgaaaaaccagtaatttcacccagttctgtatgatcatcagtttctgctaccacaattgcatgatcattaagtaggttcgactttaccatctgcaacatgtccttagcgattttttctttggcatagggcggatcaagaaaaactagatcaaacttttcatcattctcagaaaataattttaatgctgcagagctgcgcatattataaacattaaaacgctgctcttccttagttaaagcaacatttttcttaataattgtacaagcagcatgattaatatcaaccagactcgcatggtcacagccccttgaaacagcttcaattcctaaggcaccactaccagcatataagtctaaaacattaccaccctgaaaaaattgtcccaatgaattaaaaagggattctttcaccttatcactggttggtcttgtccgattacttttcaaagtaaataaatttcttttagcatatttccctgaaataattctcattttagttgattctcacttttttcttgttcaagttgcaatttcttttctgctttttgggccatctcagctaattgattttcaatatgttggctatccaaatttacttcttcttcagctgaaatttcgacatgattaacaaaatccaaatgagcaatttgtcctttgatttcattgcattcgttgcgattaacataaagaacacaatatttcatttttttagaaaaataaacaatgtcaccaaaatggcgcaacttatattgatcactaactgattttaaataaataatcaatgctacccttttaattaagtgggtactttcaatttctttattgatactcatgcaactgtttcatccttttcctgtaacattttttcatttgctgaaacgttcagtactaaaccaatcgcagcagtcaagacaatcattgatgaaccaccatatgaaataaatggcagcgtaacccccgtaatcggcaacaatcctagtactgcaccgatattaaagaatgcttctgtaaaaataatagtcgtcacgccaaagcaaattaatgcgtcgaattgagaaaccgcgtgaaccccaacttccataatctgccacatcaaataaaagagtaatccaaccaataaaattgtcagaatcacacctacttcttctgctgtaatggataaaataaagtcggtatacggctctggtaagtaacctcgcttttgcatactattacctagtcctacgccaaataatcccccattgtggattgcataataggagttaactagctgggccccacctttttgctctaattcaaagggatgcaagaacgacattagtcgttggaattgataacttctttgtaaaaatccaggattccaggcaactacaataaaaaatacagctgtcactaagatcacaatcccagctaaccaagttaaagctaatttagttggaacccctgatactgaaaacattactaaagtgatcataaataaaattgctgtcccaccaaaatcaggttcaacaataaccaaacacattaaaaaagccgccaaaattgctgggtgtgacaaattatgtttgatcttacccttgactaattttccatctcttctgtctagtacatatgacaaataaatgaccagagccaatttagtaacttctagtggctgcaaattgataaagcccaagttaatccaacctacagcaccattaactgccgcactactgccatgagcaaaacgtagaaatactagccatcctaacataagtatacaaattaataaaaatccccctacaaactttggatttttaaatactttgattcttaatgcaaaaaacggaatcccaaacaaaaagaaagctactatagcatagattgcttgccgtatcccatagacatttggcttaaatccattaactaataaaatatctgaactagctgaatataccaaaattatcccaaccactactaaaataagatagggaataaaaatctggtaattaagataacgtaattttcgacgcacaagcgttgcccctttatctaaataatacttttttcattataaaacaaaaagatcatcacttctatcaagtgacgaccttttaaaatttattaaactatcttagttagcacggttacgcttcttatcagccttttgacgttctgaagtgttcaaaatcttcttacgtaaacgaatagattcgggagttacttcacaatattcatcatcatttaagaattcgatagcttcttcaagagtcaacgttctaggagtcttaatagcagcagcgtggtccttaccggcagcacgagtgttagttaagttcttacccttagttacgttaacagcaatatcacgttcacgtgatgattgtccaacaatcataccttcgtaaacttcaacaccagcaccgatgaataactcaccacgttgttctactgattgaagtgagtaagtagttgattgaccttggttaatggataccaatgcaccattacgacgacctgggttccagttctttactactggcttatatgcttcaaaggtgtggttcatgataccatatccaccagtttgtgacatgaattcattattgtaaccaatcaaaccacgtgatggaactaaaaattcaagacgagtttgaccattaccagttgattccatattcttcatctcaccttttctttgtgaaagtgagtcaataacagaaccaacatattcatctggagtatcgatttgtactgattcaaatggttcgcacatagtaccatcaatttcacggtaaataaccttaggacgtgaaagttgtaattcgaagccttcacgacgaagttcttcaaccaaaattgaaaggtgaagttcaccacgacctgaaacagtccaagcgttcaattgatcagttggttcaaccttcaaagaaacatcggtacgagtttgacgaatcaaacgatcttcaagcttcttaggagttacttgatcaccttcacgacctgcaaatggtgaatcgttggcaacaaagtccatttgaagagttggtggatcaatcttaagaagtggcaatgcttctggatgttcagctgatgcaatagtttcacccacgtagatatcattaataccactaatggcaataatatctccagccttagcttccttaatttcgttacgtttcaagccaaagtaaccaaataacttagtaacacggaagttttgagttgaaccatcacgcttcataacagtgatgttgtcactaactttaaccttaccacggtaaattctaccaacaccgatacgaccaacatagtcatcccaatcaagcatggtgatttggaattgtaatggctcatcagagttgtctactggagcaggaatattcttaataatggtatcaaagattggatccatagtttccttttgagtacttggatctggatcatatgatgaagtaccattcaaagctgatgcataaacaactgggaagtcaagctgttcatcgttggcacctaattcgatgaaaagttcaagtacatcatccaaaaccttcttaggacgagcgcctggacggtcaatcttgtttaaaacaacgataggttttacgccagcttccaaagctttctttaaaacgaaacgagtctgtggcattggaccttcataggcatcaaccaaaagcaatgcaccgtcaaccatgtgcataacacgttctacttccccaccaaagtcagcgtgacctggtgtatccaagatgttgatagtagtatccttatacttaacagcagtgttcttagacaaaatagtaataccgcgttcacgttcaatggcatttgagtccatagcacgatcttccagattcatgtgttctggcaaagtatcagattgcttcaataattggttaaccaaggtagtcttaccgtggtcaacgtgggcaatgatcgcaatgtttcttagatcgtctcttcttttttctgacaaaagtattcctccccactcttcaataaaaaaactgtgactctgtcacagtttcggtaacgcattagcgccttatcgaagtgcttttcttaaatctgtatagttacgttagtgaattttaccacctaactgcatacgggtcaacgcttaacaatcaagttaaccctggatttttttatgcaaaaacaagcaaaaactattaaactatggtaaaaatataatgtagataataatttttaaaaaggagtaattattttgatcttaatgaaagatatcgtacgtgacggtgatcccgtcttacgtcaagttgccaagcctttaacatttccacttagtgatcactataaaaaattagctgatgatatgatgcaatacttaattgattcacaagatcctaagattgctgaaaagcaccaattaagagcaggcgttggcctagccgcacctcaagtaggtgaaggtgtacaaatggctgcacttttagttcctgatgatcaaggcaaaattatctttaaagaagtttatgttaacccagagattgtctctgaatctgttcgtcaagcttgtcttagcgaaggtgaaggttgccttagtgttgatgaagttattaatggttacgttccccgccctgataaattaaccattcattactacaccgttgacggtgaagaaaaaaccattcgcttaaaggattacccagcaattgtttcttctcatgaaattgatcacttaaatggtcacttgttctatgaccgcattaataagcaggatccattcgcacttaaagaagatacagtcgtaatttcttaattgttatttaaccaaaacaaaagcctgcagatgcaggcttttttgtataaaaaaagtcactggttaactaggccagtgactcatacattgggaattaagaagattgaagagacttcttataacgagcaaatgaatttattaatcatttactacatgattatcgtacaactgatgttattttacgtcaataacattgaccaaatttaagaaactgtcaaatcttttgtgtaaatagatctttctcgtaaattgattttttaattatttatttaatcaaagtaggattctaaggtgtcctgaacctgaccaaagcctttgtggattcgattgaaataacggtcattgtagctcattgcctgaatgccaataaaagcatcaagcgactgttcagttggaaactctgccttaggcttagctttgcgcttgatcacattgttaaatgattcaatcatgttagtcgaataaattgaagctctgatctgcttgggatagttataaaagaccagcagatctggttctatgtctttcaagcttctgataacatggctgtaaaccttgccccatttggtatagaagtcatgcaggacagctgtggcttcttctttgtttgtctgttgatgcacctgtttgaattcgttcatgatcttttcacgatcgtcgacgcgtactttagcgcagatattgcgcatgacatgaaccaaacagcgttgaaaatgagctttaggataagtcctggccaaggctgttttcatgccaacaacaccatcagaaagaaaaagctcaacttgctttaagcctcgggatttcatgttttgaagcatatctgtccagacttcaatgttctcgctaggtgcaatgcagtagtcaatgacctccttgtgcccattaggcttgatgccaatggcaatatagactgcttcacgctcaaatgtttctcggcgcaaaggaaggtatgtcgcatccaaatagacgcagaaaaacttgtcgcttagcttgcgtttgtggtaagcctcaacctttggaatcatctgcttggaaatatttgatacctgagctggactgtaatggctgccatacatcttttcaattagatcggctatttccctggtggtcacgagtaaagcttgataatcatgctttccaagatatccgagtgctgcttgtagccaggcagcgtgtgctgatgaaattgaccgttgcgatcccgaggcacttgcacttcaattgggccaaattgcgtatcaactttgcggaaataagcaccatttctagagttgccagtattccagccatttctggcatagggatcatagcccagaaaggcggtcaattcagcttctaacaagttattaacagcctgttgtagctctttgcgcaataaatcatttattttgtctggattgaatagagcttgagcaaaatctttggtaaaatcattcatgaaggagttcttctttctgtatgtgtttttttgttcaaaccaatcatacgagaaaggaactcctttttctaatgtttaaagaaataaatttaaggaatcattcatccttacacaaactattttacagtctcaaatttaatcggtaaaaatcaaaagaaacataattatatacttaactttataattatgataaaatttttatagctattgagtaatttttactctacattgaacgtttatacattaataaggagaatcatttatgatttacaaagttttgtatcaaaaagacaagattgtcaatcctcgtagagaaactacacaaactctttatatggaagcagacaacatggtcgaagcaagaagtatggttgaggacagtaccccctataacattgaactcatccaagaattaactggtaattcgttaacttacgaaaaagaacatgctgactttaagttaacaacgttcgacaagaagtaataaagagtgcgaattaaaaataatgaagtagccgtttatgcaatcgggggtttgcatgaaatcggcaaaaatatgtattgtgttcagtatcaggatgaaattatcatcatggactgtggtattaaattccccgaagataacctattaggtattaattacgttatttcagactattcttacctaatcaagaatcgtaagaaaatcaaagctcttgtggttagtcacggacatgaagaccatatcggtggtattccatttttgttagaaaaaattcctgaaattcctgtctatgcgacaccatttgccctttcattaattagaggcaaattggaagaacacggaattttaaagacaactgaactacacgaagagcatgaggatactgttttgaagtttaagaaactttccgtttctttctttagaactactcactctattcctgatactttaggtattgccgttcatacaccactcggtgccgttgtctttactggtgactttaagtttgacttaacaccagtaatggatcaacctgcaccagattttcaaaagatggctcaattaggcaatgaaggtgtacttgctcttctctcagattcaactaatgctgaagtaacacaatttactaagtctgaacgatttgtagctaagtcactacataatatcatcactggaatccacggtagaattatttttgccacttttgcatctaatctttatcgtgtatcaactgctattcaagctgcaattgataccggtagaaaggttgcaatttttggacgtagtatggaaaatggcgttgataatggggtcgacttgggctacttaaatttgcctaaggatctaattgttgacgtagatgagatcaacaaactaccacctgaaaaagtaatgattttatgtactggttctcaaggtgaaccattagccgctttatcgcgaattgctaatggtactcaccgtcaaatcagcttacaacctggtgatacagtcatcttctcctctaacccaattccaggtaacacattaagtgttaaccacttaattaataagttaatggaaggcggagccgatgttattcacggaagagtaaataacgttcatacttccggacacggcggccaagaagagttaaagatgatggttcgcttagttaagcctaagtacatgattcctgttcatggtgagtacagaatgcaggttattcacacccagcttgctcaacaagccggtgtacccgctgaaaacacttttgttttatctaatggtgaagttgtctgctttggccctgatggcgctagaatcacaggacatattcctgcaggtgacgtttacgttgatacttctggtactgcagatgttggcaacgttgttgttcatgatcgtcaaattctttctgaagaaggtttagttgttgcagttgctacagttgattataagcacaagcgagtcttagctggtcctgatattctcagtcgcggatttgtctacatgcgtgaatcaactgagttaattagtcaagcgcaaaagcatgtttatcatgtgcttagaaatgaaatggctaaatcaaatagaccaaaagaaagtgacattaaaaaggcgatcaccgaaaatctttcagacttcttgtattccaagactgaacgacggcctatgattttaccaatcattttctaaaataaaagactccttagggagtcttttattttagaaaatgaataatatgcataaaaaaattaaagttcagttattagttaatgaggtcgctgggaatggcaatgctattaaagctgataaagaattacaagatatactaaaagaaatgaatattccttttaagcgacaaaaaagtcattatcctggagaattagtcgttctagcacaaaattacgctaatttacatctctcttctgaacatgttttaatcgtagttggtggagatggctcctttaatgaagttttaaatggaataaagacttctaattatcctgagacagctattacttatttgcctgcaggaacaggcaacgattttgcccgtggtgctggattaaccgcagatcccaggcaattaatcaacaatttgctccgagatcctgaaccggaacaagttgattgtggttttttcacatcaaatattaaacaaattcctaagggttactttgttaataatttcggtattggttttgatgcctttgttgttcatcagagtaatcatgagcaattaaaaaaacacctcaatcacctcaattctggaaatatgatttatggcctaaatataatcaaggcactaattaagcaggatacctttacagtgactgttaaaactaaaaacgaaactcttcgttacggagatgcatactttgtcactactactaaccatccctactttggcggtggttttgctattttgccaaaagcggacatttacagtcaccatcttgatacagtaattgttgaaaaaccgagtttacgcaagtttctctggctttttggtaagctgatcaaagatggttcacacgttaatgcaccagaatttcattatattgaagctaaagaaatcctagttcaaaccaataaaagtgaatatgctcaaattgatggtgaagatattgaaaagcagcccttcaaagtaacatttaaagttgatcattttaatttattaaaataaggaagaattccaaattcttccttttttatatcttatctaaaatatctcttttcgaattatgattttgataatattggtcctgatcaacgaaatcatgtacttgatcataaaatttcttccaataacggtatttttgatactgcttttgccactcccgtgcttcctgcaagtaattaccaagaagtccattaatctgatcgatatgtttaatcacctgattagcatgatacaattgctcttccacctgcttttgagttaacgttgactcctgatcttcaaaaaatagaacattttcttgataatttttttcttcttgcaattgtttactattgtccatttcttctttgatagctgcaatttcgtctggctgtaatccaattccagttttagctttgactaataacgactgaatatctgccaattgcacaacatctatttccattttttgataacggttcgaatcagtcaatgtgaactcatcatctgttctacttacaaatacaaccacgtttctgattaattgatctatatttggcaagcgtctcaataaattaataatcactgggttgttgcttttttctaggacatatttaatactttctttatgcttggccacttgatcggctatctgatcataatcagcctgcacattatactgtccatttttacttgttcgtgctttggtttccaagcaaaaaatcccgctagtcgtaattatcacatgatcaatttggttactccctaaactattctttttttcatagggatatggtaacagtaaattatgaattatttctttccctgtctgcacttcacgtaaacgagaattcactaattcttctgcggcagcgcctgccaagagattgctaagatggcgcaaatcacgttgagataaaatattcataggtcgcaaatgttttatttgattcaaatgtagttcagtcattcttttctgaaatgcgtttactttttgattgtaaaccttatagccagaattaattgcccgaattcgtaaaacattttgcagagccaaagctcgtttcaaatcacgtttattattcaacaaagttttttcaactatcatagcatcatgaacagtttgtgaatcagttacttttttatgtgtaatccaagctttttgataactagcatgattttctaactcattcacatactgatttaagtcattttccaaaggcaaaattttgtttctaccttctttgactattgagccataatagcgcaaattttttgtaatttcgtctaactcattgaattcatgtttgccataatggtaagttaccttagtttctccattccaactagtcttacgccaataatgaccatccgtctcaccaaattcaactaattccgccactgaacgatctaaatagtacttaatcaaataatgacaatggcctttattgtcaaaaatgcgtcgcttaatataacccggtcgcattaattcaatgatctgaaaggtcaagttcttatgattaggaaaacggtatggtaatcttttgcctgcaattttttcaattttagttatttctttcttatctgttacagataattctatttttttcattttcttcttttttcgcttttgaaaaaaataataggttaataagcctattgttagtgtaattattgtaatatccatgttaattatccatattttggaacgtatgtttagacaacaataattataccatgattttgtataatgaaaaagccccttgttttaacaattcaaggggcttttatccttataatttgatattttccattccaatcattggatcaatttcaccagaatatattttttccgaggttagaacaaaatcttctgctacttctgctttatcggtttcattctccatttcttgagctttttcgtgctgcttgctttgatcagatttatccaatgattttgtaatacccaattgctgacaaatcttcgctgctaagccagtcttacgatcatttcccggcgtcttaaaagctgccacaaatgcccgtggatcaccaactaacactaagtttttctcagctcgcgttattgcagtatacaaaaggtttcgttttagcatcacaaaattctgcatggttagattcaagatcaccaatggaaattctgaaccttgtgatttatgaatagtgattgcataagcccgggtcagatcatttaaatcttttctagaaaaggcaacttctcttccatcaaaatctgcaatcatgcattccttggcatcatcttcatcaatgctaatgatcttaccaatttgtccattataaatatctttttcaggattattttgcaattgcagaatacgatcgccaattcggaaaacttcattatgtgcttctaataccttacttttaggctgagatgggtttaaaattgcctgaataacattattaagattagttacaccaccattgccaagatacatcgcgctaagcacttgaatatcatcttttgcaaatccacgttttaaagcaagtttaacaatttgtccaactgcatcccctactaattcgggacgacagctaataaaagaataattatttgttttcttaaacaatgcttgctgatctttaccctcattaacatcatgcgccaaagtaataatcgttgaatcatcaccctgtctatgaatctgcttcaaaatagtagttggaaacgcttgcgatttaatcaggtcactgaagacattgccagctccaaccgaaggtaactgatccttatcaccaacgaaaacaatatgccgcgtatcatgaatacttgccaaaagttgtttaaaaaggaacatgtcaaccatcgacatttcatcaacaattaagatttcaccatttaactcattcaagtcctgagtgttagtatcaccaatacctaaccccaacattcggtgaattgttttagcactgattccggtaatttcacccattcttttagctgcacgtccagtcggtgctgctagtaaaaacggaggatcttcactgtaaagagcggaggaaggaatctcagccagcttgcgtaatactaataaaattccattaatgatagtagttttacctgtacctggtccacctgtcaaaatagaaatcggttggttaactgcgtttttgatggccaacttctgtgtatcgtcgtagtgaatcttaagttccttttcagcatccttgattgcttgctctacctttttatcatcatattgttctctttttttatcttcttttttttctaccaagtttttcatcaagcgagcaatatcaacttctgtttgataaatattttgtagagcagcattctcaccatcaactattactttgccagcttcttgtaaactattaatacagctagcaattgggtcgaattgattgatttgaagcaatttacttgcttctgttaataactcagctaagcctacataagtatctccctcaccatttaaagcatcgagtaatacttgataaacagcacctttaattctacgtggatcatcactagcaatatctaattggcttcccatcatatccgcggttttaaatgcaaaacccgaaatatcattaactgctgcataaggatctttctctagttttgctaatgcttcaccatgataaagctggtaaacccgtcctgcaatacgcttattaatgccgtatttagccaattttaaaattacttctgaataagaatccatcgcatttagtcctgccaaaagactatccttttgctttctagttaaagaaagcttatcaatcttagctggactttccttcaatacatctaaggcatttagccctaattcatcaataatcgtagtcgcagcctttttaccaattccagggaacttattcgaactcaaatacttagttaaagatccctcttcatgtggcaatacttgcttatagttatttgctctaaactgcaagccaaatttttcatgcattactagtttaccctcgaagcgatagctactattaatttgaatatcgccaaaattccctgtcaccttaatatcgggacgagaataatcggataaagtgccgataatttcaacgtcaagaattttatacaagtctttactattttcaaaaacaatcccgttaaccttaccggtaaattcattcataatttttcttttccttgtcatttagcatcttcataattgaagcatactgattcattgcttgttgataatacttagcatccatctgcttagcttgagcaaaatatttttgagcctggtcacgatctttttctaatgtagtgacacctagtaaaaaataaactttcgcatttttcttattatcaggaattgccaaatacatttgctgagcctgttgattctcaccccaacttaaccaaatatcgcctagcaattcctgaattcgctcatcaatttttttgatcgtcaaagcataagctaaagctttttggccttgccctaattttaagtaagttagtgccttttgataaagagttaagtcatcattaggtatctgatctaataaagccagtgctttatcaaaatcgccttgcatgtaataacacactgccagattataatttaattcttgtggctctttaaccagatgctgggcctgctccaatagcttctgtgcttgatccaagcttccttgctcaattaaatacgtcgatagctgcaaataattagcaacttgttgtggatgctgatcgatttttttgattaaaagatgaatggcttgttctactttaccttcatcataaagttgcgctattttttgatccattataacgagtccgtcttcgataatttacgtcctaaataactagtttcattccacactaccggtttaaaagtctttccgccatctagtgtttctaagacagttaaagaggtattgctaaggccgccatttttgcgaatatctttcaatggatagcctaaaagtccacccataatagctgataatgccgcaccatgactaactgctagaatcttatcatcatcgtcaggaaatctttgtgccatttcttgagcaaatgcttttccacgagcaataacatgtggataatcctcaccatgaagttcagtcggatcatatttatctggatggtgccaaaaattatccatttgtttagggaattttttctctgcatccccaaacttcattccctccatatcgcccaaattaaactctctgagtcgttcatcgatcacaacaggtaagttagcgttcattgcatcatcgatgccctgagcggtattaaaggcccgatcaagcggactggcaaaaattcctctaaatttagttccttgcaagtgatgacctaatttttttatatcttctaagctttgtggcaaaagtggtgaatctccatgtcctccttggaagcgactagctaaattccactcagttttgccatgacgaacaaaataaatttgcattgcttaaatccccctaattgtctaatcaataagaatagtttagcacaaagaaaaaggcgttcgaaaaatcgaacgctctttttgcatattttttaaactaattgtaattgcttttcttcttggtaagcagcatcaatattaccgccacctaaacattcttcacccttgtataaaacaagtgcttgacctggtgtaactgcacgagctggctcatcaaagtaaacatcagcagtattgtctgcggcatgatacttaacagtcacgccgatatcacattgacgataacggaactttgcagtacagtgcatctcaaaatcatgatctggcttaccagtaaagaatgacatatcacttgcattcaagcgactagcatatagaagtggactatcatagccctgctctacaattaattcattcttcttaagatccttgccgaccacgaaccatggatcagttgattccttagttgagcccaagcccaagccctgtctttgaccaatggtgtagtacattaaaccagcatgctcaccaactaccttaccatcaggagtgaccatcttacctgatttagctggtaagaattcacttaaaaactttctaaagtttctctcaccaataaagcagatacctgtagaatcttttttcttcgcggtagctaaaccattagccaaagcaatctctctaacttgtggcttagttaggttagctagagggaaaataaccttactaatctgctcttgactcaattggctcaaaaagtacgtctggtccttgttaccatccttaggacgcatcatatgagtaacaccattggtatccttaacagtcttagcatagtgccccattgcaatgtagtcagcatccaagtccatcgcaaactccaagaacgacttgaacttaatctgactattgcacattacatcaggattaggggttcttcccttcttgtattcatccaagaaatattcaaaaacgcggtgccaatactctttttcaaaattaattgaataatatggaataccaatcttatcggcaaccttttttacatcttcatagtcttcagtagctgtacagacgcctgaatcatcggtatcatcccaattcttcataaagacaccaacaacatcgtagccttgttgtttaagtaaaagtgctgaaacagacgagtcaacgccaccactcatacctacaactactctagtcttgctattgtcaaccattattcaatcaatcctttacttcaagcaaaatcttacgctcctcaagatcctttaaaatataatctaaaagttctacagtaggagctaattgcttatttttaaaaatattaaccttctgcaaaccgttgcgatcagtaataaccatagttaaatgcgacaagtccttattaatggtcatctttaacttagtaggcgcgttataaggtgaatcattgtaaagaggatgttcataattaaaattacccttagctgtcttcacaaagccagcatcaatcaaagcataaagcttcaactcaagattcaaagtaaacttacgtttatcaccattaatcacaactgtatttgccataattttcctcacttatttataataagatactttctttttgaaagcaactatttatttttagattgaattctttgtacaatttttactaattcttgagcgaattgctcaatttcttcatccgtattataacgcccaaatgaaattcggatcgactcatttattcttggtgaattttctccaaaacaagcaattaaaacatgtgatggctccaaagaaccagcagtacatgctgaaccgcctgacacggcaaatccattcaaatcaagatttgtttgtaaagaagtagtagatacaccattgagatgcagattaagcacatgatgtgagtaacccggaccatacccaccattaatttcataattaatttgatgatcgtctaattcctttaaaataatgtcttgataatgagcatatttcttttgcaaagcatcacgaccaatctcggatacttcacggacagcttcgccaaagccggcaattcctggtacgttctctgttccagctcgacgtttggtttcctgctcaccgcctaaaatcaaatttggaatatcgatatccgcattttcatataaaaagcctaaaaacttaggtccattaattttatgtgcagaaacagacagaaaatcaatgttcatgtccttaacatcaattttaattgtgcccattccctgaacattgtcaacatgaaaatatgcattggagtcctttaccattgccccgatttctttgagcggcataatggtaccaacttcattgttaacggccataatcgatactaaaatagtgtctggcgttaattccttttttaactgttctaaagaaatttgcccgttttcatcgacattcaaatagacaatgttgtagccctcattttccaaacgtttcattggattaagaaccgagggatgttcgatcggcgtagtaataatctttttaccaatatttttacgagcataggcagttccaagaatcgctgtattattgctttctgaaccacctgaagtaaaaataatctctccatcttgagcattaatatcttgagcaatctggtgacgagctcgatcaattacatttctggccctacgacctaattcataggtactagaggcattaccaaaatcatttttcatttcatcggtaataatatcaattaccttgggtgacattggtgtcgttgccgcattatctaaataaatttcacgcacgtttaattcatcttttctacataatcactaattaacttagctgccttagcgccgacttccttgacaaacttgtcaaaatcattgtctgcattagcatccccattatcggaaattgcacgcatagcaaccaacggagttttaaaatgacgagcaacttgtgcaaaagcggctccttccatttctactcctaaagcttctggaaagtttttcttgattaactctttttgttcttctgattgaacaaaagtatctccagtaacaacaagcccttccttaaaatctacgtcttcttcacctaaatatttcttaaatgcttccctttcaggcgaattcaacttaaaggtagcaggctctcttggaatctgaccttctacatattcaccggcactaacacagtgagcatcgtgataggcaaaatcatttactaaaatcacatctttacgatgaacatcatcttgtaatgatccagcagaaccagtcataaaaattacatcaattttttctttagttagtaaactagtcagattcatagcggcattcactttaccgataccacttaaacctaaatatacatcattgccattaacagaaaaatgttcgaattctgttgatccgaacatttcttttgtttctgcatggaaatgatcacgataaaattcagcttcttccgccattgggacgataatcgcaatcttcaatttatttcctcatttccactataaatgaaatagtgctaatagcaccaatataattaaaacaatcactatcaggatagcacgattcaatctttttttcagtcttaaagacttctcttggcgaatcgtttccttatcactcgattgattatgctgataaaattcttgtccatccccagccagagggcgtcttctaggttcttcttcagagtcatcccgcttaaagtcaggatttacatctacttcttctgaatcattatcagaaaaggaagattttagcttactaagtaggctttttttctgccttttacgataatcagagcgtttttctaccataactaatccttattatcggtctgagcattacgcaacatcatattctcccaaacagtaattgcataaattgtctttgcatcaacaatttttccttcagccaataaagtttttaattcatctaagctataccaactagaagttaaaaattcatctgcatccagtgcccgcttatcagtcaatttagttaaggtatcacaatagaaaagatacatcttttcatcacaaaaaccaggagaagaatagaattcactgaccttttcccagtaatctgcgcgatagccaccttcttcattcagctcacgcttcattgcatcaagcggacttgcatcagtggaatcaaccaaaccagctggaatttccaaagtaatctgcttaattggttcccgccattgctttactaacaacatcttttgttcatcattaattgcaataacagccgatgcaggcttatgcttaataacttctctagttgcagtttcaccattaggaagcttaattgtacgaacagccagatccaaaatacgtccttgaaaaatctgctgtgacgagatttctgtttcctttaaatccaaaatcccagctcctttttaggctaaataaacatttacacattgcagaccatttttaccttgagctaactgatatttaactctttgacctacttgcaaagttttatagccttcctctttaattgctttatagaagacaaaatatgacttatgattacgatcatcttcaataaagccatagctactgccttcatcaaattgttctacagtacctaaccgcattagttttcaaatccttcttgaacagcttctgggtaatctgcttcaacgattttagcacaacgaccacaaagcattggcaactttggatctacgccaatatcagttctaatcatccgacaacgaggacatacttcgccttcagcatgttcaactactacactagcattattcaattgctctgcattatcaggtgcttcaccatcagcaatagttaacttagatacaattagaatttgtctgaaatcagcatccaagtcttggagcattgccttagtttccttatctgggtaaatagttactgttgcttcaaacgatttaccaattaacttcttatttcttgcatcttctagagccttcaagacgtcatcacgcaacttcatgaatttaccccaattttcaagcaaatcatcatggttagcatattcttcaacttctggcatattagcaagttgaacgtaatcttcaggttctttcaagaagccccaaatttcttccatagtgtgtggcaaaattggtgttaagatcttagccaatttaacagcagcgtcgtaaataacagtttgcattgagcgacgatcatggctgttttcaccatcaatgtaaagtacatccttagcaaaatcaagataaaatgcagaaagatcattagaaacaaagttgaagaccttcttgaagacagtagtaaaatcaaacttgtcgtaagcagcaagacagtctttaactaagtcatttaatttcacttccatgtattgatcaactgaacgaagatcagcataagcaacgcgattttcttttggatcaaaatcactagtgttggccaacatgtaacggaaggtatttctgatcttacggtaactttctgcagactgctgcaaaattcccattgagactgcaacatcagaagtagtatcagcttgagctacccaaagacgaataatttcagcacccatcttcttaattacatcgtttggtgaaattacattgccaagtgacttagacatcttgtgtcccttatcatcaagcacaaagccttgtgataatacttctttataaggtgccttaccagttactgcaacagacgtaatcaaactcgaattgaaccaaccacggtattggtcactaccttcaagataaagatcagctggatagtgtaaaccatcacgtttttccattacgcctgaccaagatgaaccagagtcgaaccaaacatcaagaatatctttttctttagtaaactcgccatttggtgaatgttctgaagtaaagccttctggcaacagttccttagctgtatgagtgtaccaagcatttgaaccttctttttcaaagatcttggcaatatggtcaatcgtttctggagtaacaattggggtaccgtcttctgcatagaagatcggcaatggtacaccccaagcacgctgacgagaaattacccagtcgccacgatctttaatcatgttgtaaagacgagtcttcccccatgaaggaataaagttagcttgttcaatttgatccagaatttgatctctaaacttagaaattgaagcaaaccattgagtagttgctctgaagacaacgggcttcttagtacgccaatcatgtgggtatgagtgagtaaagaagcttaacttgagcaaagcgccagcctttttaagcttatctgctaccaccttgttagcatcatcatagaacattcctacaagatctggatctggaatatctttagtaaagcgaccttgtgcgtccattggactgaagaccgggataccatacttttgaccaacacggtagtcatcttcaccaaaaccagtagcgttgtgaactaagccggtaccgtcatcatcagtaacataggtgtcattcattaccaaaccatattggcctacaccagtcttaccataaaggggatgcttataagtcatcccatcaaaatcagtaccttttaattgtttaagtactttgtagtccttccagcctaagtcttctgcaatggctggcaaacgatctgaaccaattacatacttcttaccgtcaacttctactaaggagtagtcaaatcttggattaacggtaatacccacgttacttggaatagtccaaggagtagtagtccaaattactaatgaaacatctgaatctaagatacctttaccatctttaattggaaaagcaacataaattctaggtgatttaatatcatggtattctacttcagcttcagctaaagtggattcacttgaccatgaccagtaaactggcttcaagcccttataaatataaccttttttatacatttctccaaagacgcgaatttcttgtgcttcaaagtcatgttgcaaggtaatatatggattatcccaatctgccataacgcctagacgcttaaagtcggccatttgcttttgaacttgttcttcagcatattgtcgacaaagctcgcgatacttagcacgatccattgtcttacggtcaacgccttgcttagctaattgttgttcaactggaagaccatgagtatcccaacctggtacatatggtgcataataaccgttcatattcttgtagcgaacaatgatgtctttagaaatcttgttcaacgcatgtcccatatgaatattaccattagcaaatggagggccatcatgtaaatcaaaacgaggcttaccttcgtttaactttaatctttgttcatataacttgttatcttcccattctttttgccattcagcttcacgaacaggtagattaccgcgcatcttaaatttagttttacctaaattaagggtatctttgattctcattaacaaaattcctttctaaaaaagaaagcctcatcctaaaattaggacgaggctaaccgtggtaccacctaaattgaacttattataagttccacttaactttgcgtaacgtgcaaataccgtttagattaattaggcagctgatcagctcttaggctcttatgctagtcttccaccatcactagctcgctgaattgccttcaagctttactgtcaatctaatatgcttattttttatagtcgtcaggaaaaacaattgttgggcctaaaggatctgatttcatttcaggcttaacattaattgtttcatgacttggactgtccccggtcattggtttaggtgcagcattttcttcattatctgcatcgtcagaatcatccggttgatccaactccaaatcatcagggccttgagaagagtttacgtcattttcatcatcattgtcaacatcttcatcttcaacgtcttcatcatcagcacttactggctccgaaccatcatctggataataacgctctaagttgaagtaatcatccaatgcatgttgccacttttcatcattcaaattatcgatttcagtctgtagcatttcttgaatattactacgaaattcactaacttgctcttttacacgcatataatccgtagaaatagtatcttgttgatgcttttggaagttaatattatcttccgcttgctttttggcatccgcaataatctgcttagcctctgcttctgctttctctctaatttcatcagcagtttgttgtgccgaaattaatgatttatttaaagaacgctttttttcgttatattcattaacttgatcttgataatcatctactttttcttgtaaatcagttaactttttatttaaagaaactacttcattcttcaagtcaaccacttgatcaagtgtatcaccataatcatcaacaatctgatctaagaagctatctacttcaagacgatcatatccattacgaccacgccgtttaaattccttgttgtgaatatccatcggggtcaattgtgtttctttgtctgccaaagtctgagcaccaccttatatttaccttttcttgtagtcgaaacatcctcaatcaaaatccgaccaaagtgtcttaaactcaagacatcgtcttctttaatcattatattagaatctgctatttcatgccaatttaatttaaccagctgactattaatcatcttttgaatttgaccgcggctttgtctgctaatacccgataatacagcatcaattcgcattgaggcaactattttcgttttttcaatcgaatcatcctcaggaaccaaaacttctttgaagctaatcggtctcagctttacttttgctctgccaatgcggtcaatttgctcttcaaaaaattccgtcatttcttttttagtgaaaaactgccattttccttgattatcattaataatatcgccaaaaatacttgtatcaatacccgaattcgccaaggtgcctaaaataacactatgatttattttagtaaatttttgcggatattcaatttcatacggctgaatctgataatcactcggtcgcagattaagccattcttcacttaaataaactcgctttttctctgcattaggatagccaccatactcttgaacaaatgcatcattaccaacaattgttcttaaaattgctcgttttcccggatccaaaaaatcagtcaaaattggctcatgcttaaaaatcagctgattaaaaagaccagtaaaatagtcaattactggtctttcctcttgattaaaatgtgggtaaaacttacttgcctgtctgcgttccattacaccatcatcctcaataaaatatcaaatatccatcttaaaacatagttttgaatgaaatataagataaataaagcaataattggcgagacatcaattccagttgaataagctaatctcgcaaatggaccttttcgaaacaaatttaaatatggatttacaaccttgtctaaaaagcgaccaacaacagaattacttagcattggtagccaactcataattgcatcaatcacgatcagcagactataaagccataaaatccacgtcagtgccaagtagattaaatttaatatattaaccattagcttaaattgtctttcttatccactaaatcactaattttgccatcagtaacaaactttggtggagttgctaaaaagattttatcaccaatacgttggatttcaccatttaatgcatatacagtacccgtgatgaaatcaacaatccgacgtgctgaactgtcttccattctgctaaaattaatcactactgctttattatttaataaattttgtgcaacatccttagcatcggaatatacccgtggttcatataaaacaatcttgcttttagccgaattcaagcctgatttaattgaaaccacattatcgcgattaactgagttcagaggcaagtcttcattttcatttttagtctgtgaggcatattcttcgtcattttctaattcatcatcattagaaattccgaaaaatcttcctaatttatcaaaagccatttatactacctccaaaactagttttcactacgatgtttaaaaaatggaatatcactgttatcatcactatcgtcctgagcgctagtttcaatttgagaaatactatcctggtcttcatcactaaaagtatcaaaaccctcataatctttcttaggctcagtaggttgggtatttcttctttgattgtcttcgctatcatttagtccccaaacactggttggatcaaccatcgtttgcttaggctgctcaggttcttgtttttcggcagcaggctgaactgtttgtggtcgatcaactggttgcttaggttcttcagccttaggagcttcttctttttctttaactggttgagccttaatttgttggctacgacctggtaattgcttagaagcagcttcttcagccttagaatcaattccagtagcgattacagttactaccacctcatcgcccaagttaggattaattgaagtaccgaaaataatgtttacatcgtcaccagcagccttagaaacaatctctgaagcatcttgagcctcaaataatgtaaggtcaggtccaccagtaatgttaagtaacacttgcttagcaccatcaatagaaacttctaataatggtgaagaaatcgccagcttagtagcttcaactgttctattttcaccgctagcacggccaattcccattaaagctgcaccttgattttccattacagtcttcacatcagcaaagtccaagtttacgtagtcagttgaagtaatcaaatcagaaataccttgaacaccttgcttcaagacattatcagcttccttgaaggcatccatcataggagtcttcttgtcaaccatttcaagcaaacgattgttagctataataaccaaagtatcaacatattgctttagctgagtaataccttctgcagcgtttttagagcgcttagggccttcaaaactgaatggacgtgtaactacgcctacagttaatgcgcccgtctcacgcgcaatttttgccactacaggagccgcaccagtaccggtaccgccacccataccagcagtaataaagatcatatctgcacccttaagtgcatcttcaatcgtttgttcactctcttctgcagctttttgtcctacttcaggatgtgaaccagcacccaacccacgggtcaacttaggccctagttgaatcttgttttcagctttgttgctgttcaaagcctgaacatcagtgtttgctgcaataaaagaaacaccttgtacgccatcgtcaatcattcggttaacagcattgccgccggcaccaccaacaccaattactttgatgacagcattcttattgtcgtctgaatcgaatgtaaaatccattaaattaaccacctttaatcaaagaatttcttaaagaaactcttcaagctattagttttttcttgcttagtattattttcatcgtctggcacagattctgttctggcagacattttgcttctattataagcttctttagcttcactttcactattagaagtcgtacttttagaaatcttggtactttttggctgagaaacggggtcttccacagcgggttcaccaaaaccatagattacgccattaacaagatagtcaacttcagacatcttatatgaatagtggacgataccataagcagctgtataaatcggattacgcataccaatttgatctggttcataaattcgggccttaacatttaacccattagcagtcagactatcaattccttgtaataggctactaccacctgtaatcacaataccacctggttgcttcaatgcattatgcttaactaaaccttttcctaaacgagtcaaaatttgttctaagcgtgcattaataatttcactaagatatacttcgtcaaccatttgctgactatttgcaccaacactattaatagcaaatttatcgttttttgaggcaaattgtggatccgcaaatccatagtccaacttaatttgttcagcatcctttttcgaaatactaaaaacagcagagatatcattagtaatatcgcttccgccttctaaatcgatgttggcatacttaatttggccatctttaataacagttgccgtacttacgccaccaccaagatcgataattaccgaaccaaaagttttttcactttcattcaatgctacacttgaaattgctaaaggcgttggcacaaagaaattattatgataaccggctctttcaatagccttcttgatattgtgcaaaggactagtaggtgcagttaataaaattccactaacacccaaggaacgtgcaatcatttttcttggatcatcaacttcagttttaccatcaatcaaaaagcgactcggcaaaaatgtaattgcttcacgatcatccttagctgctgaatgaatcgcagatctaatcgttctttttacatcatcattatttacttcttgcccttgttcaccaacattagcaaaaccagttgcagtttccagttgtaacatccctaccggaattcctgtaactacactataaatcttggcgtttgttttttctgctacaccttttaatgcacgactaattgcactagcagtttgatcaatatctactatttgaccgtgtcgcattcctgaatttggcgttgtaactgcaccgataaccttaccagaatctgcaacaacggcttttacacttgtggttcctatatctaaacccactaaaagatttgaattctccaaaattaagcccccattaatatttgccttgaaaaaattctaacataaataaacttgcaaaacagctacgatatgccataagctttcttttcactagaagttaatggtctactaaatgcacctatttctaaatcaataaggctatgtttaccagctttaattctaatagtatcataatattttagtttgctattcaaagtagcagtattgccaatcactacattaccgtccttcattactaaaataatttgtgaatttcgtctggtattcccacttaataattttacctgatttttaaatgaattaggtaaactgttaaataactttaaatcattttttaactcatctgatttattatagccaacaaaaataggtttatcttggttcacttttgtccaaggtagagctctcgtacctatttttccattatccaaaatctttcggtaagaataaccatcttttaagtaacccacggttttacgttcattaatttgtaaaatcaattgattaatatgacctaaatgaacttgtgcactttgaatttctggatatttttgggataatctttgactcaaatctttttgttgaaacaagtaatcaaaaactttatcgctagccttgatcttggataccttaacaatttctttagcaggtaaatgctctgcaccaattattttaacagtactgatattcgctaaaggtgaaatatagtatcctaaaccagctatcgccaaaactgaaaccgtcattatcagacctagcctacgtcgtaatgatcgtcgtctttctgcctgtaaatttgagagtgaggcagaaatcttggtctgcgattttcgactattcctttgttggttaaattcatgattcaagtacggagacaattctttccttggatcaatcttagttactggctttttggccatctgcctcacctacctcctagcgtgaaatttcttccatcaccttaatcacttgatcagatgcatcaggtacgcctaaagccttagaagctttgctcatttcagtagcatacttttcatcgagcaaaatatggtcaattgaagagacaaaattatttggatttaaatcatcttctggaataaccaatgctgcaccagctttttctaaatcaagcgcattcttcatttgatgattatgagttacattagggcttggaatcaaaataacgggtacacctaatgcagtaaattctgcaatacttgttgcaccagatcttgaaacaacacaagtcatttctggcaatagacctggcatgtttttaatgtatggcaaaactttaatattattaccaatatcaacattcttaattttttcttgtaccttatcaaaataaaaagtacctgttgcccaaataatttgatatggtttttgctttagcatcattaatgacttaagcataattctgttaattgctaatgctccacgggatccaccaaatactaaaacagttggcatttttggatttaatccccatgttttttcaagatcaattttttcttcgtgcaagcttaaaacttgttgtgaccgtggattacctgtcttaactagtttcttcttttctgagaattcctttgcagcatcatcaaatgtataacaaattttatccacataatgacccaaaaatttattagctaatccaaccactgaattagattcatgaatcattgttggaatatgcattttagctgcttcataaaccatagcaccgctaacgtaaccacctgtacctaaaatgacatctggtttaaagtcccgtaaaatttggcgtgcgcttttagtagcttgtaaaaatagcttgatagtctcaaagttttttaacggatgtttacggttaaagccttgaatcttaattgttttaaagttaacaccggctgctggaacaatttttgattccaatcctttttgtgtacctacaaataagatttcatcgtttttactaataccgcgttctttcaaacgttcaataattgccataattgggtaaatgtgaccgcctgtaccgccacctgtaaaaataactctcattttatttagtctttaattcctcaacaaatctaacaaagtaatcgccacgttcttcaaatgttctaaattgatcccaagaagcacatgctggtgagaacaatagtacatcgcctggttcaactaattcccaagcacgaggaacggcctcttgtagtgtattaacaattacaatgtccttaattcctgcttttctagctgcgtcagctaacaaatatctagtttcaccataaagaacaattgacttaacatgttttttaaataatggtaccaaatcatcaaaagtgaagccacggtctaacccaccagcaatcaatacttccggttgcttaaatgatggaatagctacagttgctgcttcaatattagttgacttagaatcattataaaccttgcagccatcaagtgttgttacatattgcaaacgatgcttagcgccagtaaaggtgctcaatactgcggcgatatcatcattatcagcgcccataattttagaaattgcaatagcgactaaactattttgcaaattatgaatacctggtaatttaatatcagaaatcttcataatcttttcgttttgactttcaagatattcatcgccaatgaaataatcagcattatgatctgtctcagaaaaagtttgcattttagctggtgaaacttctttttccttagccaaaatatctttttgatcataattagcaataaagtaatcattactgttttgcgttctagttacattcaactttgcattgacataattttcaaaagtcttgtgataatctaagtggacgttgttgtaaatatcaacgatcgctgcaactttaggatcaatatcagttacacccaaaagctggaaactagaaatttcaactactaaaatatcatccttagttgccttaggtacaacttcagaaatcggtacgccaatattaccaactgcataagcatgatgaccagatttttgcaaatgatggtccaaaattctttgtgtcagcattaccgtagtagtttttccatttgaaccagtcacacaaacatagggagcatcactacaacttaaggcaacttctggttcagtaataatcgggatattcaactcctcagctttttgaaccatcggattttcatagggaatacctggatttttaactaaataatcaaaatgttctttttcaagcaaatcaactggatgatgaccgccaattacgcgcacgccgcgacttttcaattcttgtgccttagcatttttctccaaatcagctttatcatttaaagttaaatttgctcctaattgcaaaaggagttcgctaacagcaaaaccacttttacccaagcctagaaccaaaatgtttttattattataagttttaatatccttcattttatgattatccccaaattactaaatacaaaatactgccaattaatccaactaaccagaagacaatatctactttccattctgaccaacccaacatttcaaagtggtgatggataggtgtcatcttaaaaatacgcttacccgtagtttggaaagaaattacttgtaaaattacactagcagtttcacaaacaaaaacaatcccaactaacaataatgaccagggacggttaagcataatactgattgttgctaaaccgccacctaaagcaagtgagccagcatcacccatgaaaattttagccggcttatggttaaaaataaagaaggcaattaaaccaccaattacactcatacaaaaggccaaaacagcaaaattcttttgtttgaatgcgatataggcatatgtaccatatgctacaactgataaacctgttgctaaaccatcaagaccatcggacaagttaacagcatttgaaaaaccaaccagccaaaaaataataaatgccacaaataaaactaagctatggacaaccccagcaaaaggaatatataacccaaattgaaaatgatcacttgtagcaatcaagacaattaaaattgcaattataatctgtaatgctaatttttgccatgcacgcaagcctaaattacgtttgaagtaaagcttaataccatcatcaaggaaaccgataataccgtagcctaagagactgattaccaaaatccaaacaactttattcaagctgtgctgcatagcagctacccaaataacagaaataactgctgcaattacaaaaacggtcccacccattgtaggtgtgccagactttttttgatgccatttaggaccttcatcacgaatttcttgtccttcgtgatgtgaccgcataaatttaatcaacaatggaataaagatcactgtcaaaaccagtgaactaactagggcaatacaacttgccaacatcatattcattctgagttactcctttaacttaatgtttaattttcttccagcttttaattctgttcctttagccacgctttgactcgcaacagtgccggtaccttttatgcttaacttaatatctgtcaaactagcaaattggtgtaaatcactataagtccatcccgtcatatcaggacaaatgatttttcctgaagtattgacaaaaatcttagacccagactctaacttttcgccactcttaactccttgattgctaatccgatcaccgctaccaattttaaccaaattaagtcctaattgcttagtttgactttcagcttgtgcaacggttttagcttttaagtttggtacttttacagtagttgatacatcatcatttttagcaatcgaaatgattctctgcatcatcggtttgaaaattgaagccaaaatcttttcagctccgcctccaattaagtgtggttgcttaattgtcaaataaatacagtaacgtggtttacttgctggataaataccaacaacagagaaaatataattactatcaccctttagataacctccacctttagggttagcaatctgcgcagtccccgtcttaacagcaatatcggcgtttcccatcttataagcagaaccagttcctgattgcttattaagtacctttctcatgttagccacaattacttttctggttttagcactatatactggagtaccaacttttttaatctgatagccttgaattgtattgccatcagagtcagtaattttattaaccaactgtggctttaccatttgaccattattagccaaagaactataagcttgcatcatttgcattacattcacagtaacgccttgaccaaaagcagtaattgcttggtcaactggtgttttaaacgaaatcatccccggctgctcacctggaagactgactcccgtcttttcaccaattctgaacttcctcaagtacttcttccaagtcttagcacccatcttttgttctaacttaacaaaaccagtgttacttgaacgttcaaaagcttgagaaaatggaattgtgccccaacctgaagtcagccagtcatggatagtcgaaccagcaatattaacagaaccagaccggtaatactcattagggttgtaattgccactgttgactactgcagcgaatgacaaaatcttgaaaactgatcctggttcataagtatcttggaccaagatatcccgatacgacttagttaatcccttcatagtttgaggattaaaagtagggcgttgagaagttgccaaaattttcccagtcttcatgtcttcaactgtagcagtaattgatgttggtcggtaagttttctgtacttcacttaagcgagtctcaagcaaactctgcaactgagaatctagtgttaaatacaagttgtttccatttttagcaggcttataaacctgattactatttggaagctgatattcagatgcatctaccgaagaaatccggtaaccatctgtcccagtcaaagtcttattgaaataggcttcaattcccatagttccgactaagttttgtgcattagtctttttattccaaattggttgagccaatccaacagtatgtgatgcaaaaacaccattgggatacaatctagatggtgtttccaagaacttaattcctggtaatttcattgcttcaatctttttcttttgccgcaatgtcagtccactaccacctgtcccaaattgtacctgaaagaccttctttttgggggttaaatattggtaaattttttccgcagacaatggtaaaacctgtgccagcttttcagctgtcttggttttattcactacatactcaggtttattcttatagttgatcgaagtcttatctaaaatcgcataaaccgtatacaaatgcgaatcttccgcaattgttaatccatttcgatcatagatagtccctcgcgtggccttaattacctgattgcgcttataaagctgcttggtacgctgtgataaattttgaccattaactgtcttggatattccgatatataaaaatctagccgtaaatacaagaaaaaccaaagccacggccatttggagaaatctccccaccgtaaagcggtagccgtgggctttggatttttgtaattttaaattactgttttttttcattaacgaatcgtcctaatatttttgttaattagagttaatcctttttcacgtgcaattttatttaaacgtgaagtagaggtcaactccccaatctcttgacgtaaatcggtaatcttattctgttccttagcaactgtttgttgagttctagtcaattcatgttgagccgaagttgcagaaatactagaagaaactagaaagatcatcatgcccaacgtaatgacgcttccaataatcatcaaagctttttctatgccactataaggaactttacgcggatcaaggataattcgttgtcgtctttgcgaaccatttctactacttggttcatattcaatttttcttgctgagctatcagccataacattttcctctttataacttctctgcaacccgtagttttgcactgtgtgagcggttgttgttctctaactcagaagtagaggctacaattggtttgtgatttaccaaacgtagcgttggcttcataccgtccggtataaatggcattcctcttggcacctcaacttctgaatacttcttaaaaatccttttaacgatcttgtcttcatgagactgaaacgtaattacactgattcgaccacctggacgcaatatcttaattgcttcctctagcgaagcttgtaaaacatcaagttcgtgattaacagcgacccgcaaagcttgaaaactcttctttgccgggtgccctccagtccttcgtgcatacgcaggaatcgcatctttaatcacatcaactaattcaaaagttgttgcaattggcttttcccgtcgtctttctacgattctgtgagcaatttgacgagaaaacttttcatcgccatattgatacaaaatatctgccagttctttttgacttaaagtattaactaactgataagcatctaagtcctgactttgatccatcctcatatctaatcgcgcatcataacgatatgaaaaaccgcgatctgcttgatcaaattgaggggaagatacacctaggtcatagtaaatgccatctattccatctgagtaacccagttttaccaggtccttttccagattactaaagttgtcatgtaccaattctaaccttggctcactatccagttgtaataaattcgcaaagttcaacttcgccgattttatcgcatattcatcttggtcaaaacctacaagcgtaccggtgtcaattttgctgagcaaatatttagcatgtccaccaccgccaaaagttgcatctacataaagaccaccgttttttggtttcaaattgtcgatagtttcgtgtaagagtacactggtgtgtttgaatttcatattttttatagttcaatgtcgtccaaattttcagcaatatcatcatagtcttcgttagcttcttcttccaaactagtccaacgttcttttgaccaaatttcaattcgatcagagacaccaatgatgacacattctttaatgagtttggcatgcattttcaacgttgttgtcagattaacgcgaccttgcttatcaaactcacattccatcgcaccagagtagaataaacgcataaatttacgtgtattcctcttagtcaacggaagttttgctaatttagcttcaatcttcgaccactcctccatcgagtagccaaaaatgcagccttccattcctcgcgtgaatatcatcttgtcgccaatctgatcgcgaagtttcgctggtataatcaggcgacccttgctatcaagattgtggtgatattcacccatgaacatggtctagccctcttccactaaataatttaccacaattccccactctctaccacattcataagaaaaaaatacagatttttaaatttcttttttattgtgatttttcaaaataaaaaaaagtcacaaaatattgaaattttgcgacttaagcatatacaagtaattttattttataacactagcatcaataaaagtccgatataccagaaaacagtacaggcagtcaaataatcccataattttctaactgtttttcctaaagaaatatttttatttctaatcgcatcgttcagcgacacaacaatcactaatacaaaatagcataaaaaaccataaggtaaaaaagaaggtttattcatatgtaaagtaattaatccacaagctgaaagaaagaaaaatggcataacatcgtaccctctaaactgtgctttagggaaaattttattgataaaaaaagcaactactaagccaataattggaattaggaaaatataaagcataagtattcctccattctttttattctaaactataattgatttgaaaaaaaccgttaataagcataaaatattgttcaaataggagggctgtttatggcacgaaaaaagaaaaagaaatcaggttttcaaaaattaactattgcaatggcttggatcatggcaattattactttagcagctgttattgctcaagctgctatctcacttcaaagtttttaaggattaaaaagacgcgaaagaaaaaatcttccgcgtcttttttaaactcgataagcgtttaaatcaattaagaatggataatcctgagctaaattgccccaaatccaatacaagagaaaaaagaagacaactgcccaacctaaactgactaaaatgctcattaataatacgtgtgctgatgcagcactaatacccaccatattaaaaatgagccaactatacgcaacaaaaactgcagttcctaataaaacgacaattaatctagcccataacatttccggtaaaaaacgagctgttttttgacagatccagcaacttgcaggtaggaaaactgtataaacaccgataatgccataaaaatagatatcagcaacaattcctgcacctaatgctaaccaaatttcattatcattagtatcatcaaacagaccaatcaacattacactgattggcaaaatgacgcttgacgctgcaaagttgtcataagtcataaactgatgtaagtaaagtgcacatacaccgtctactaccaatgcaataaataagccaattgccaaaacccattttcgaaacgtagacattaattagccacctgtctttcaattacagttacaacagatggatcactaatatcacctgctggtttaattctaatctgatcagatagaccaaatgaatcacgagttgtcgtagtaactgtaccaattaacaagccttttggtgagttaccgcccataccactagtatatactctcgtgccggccttcagtttgcgaccatcaaccacctgtgtaaaggcaagataattattggaagtaactgtaataataccatgtactgtttttccattcgcagcatccgcttgaacagagaagcgattagccgactcatcagtagtagtaagtaattcaaccttggaagaagcagcatttgcttctacaattcgaccaataacaccgccatcgcacatgacagccatattctttttaattccagctgaacttcctttattaatcactaataaatctgaccatgtatcaggcgaccgagaaataacagaggcgttgaccatggtatagccacttaacgtatcttttaatttcaatgcagacttcaattgcctattttctttttcaagagctgaattgcgagccttcgtctggcctaaattagtaacttctcgctttagatgattgttttcttcttgcgtatttaaaatatcatgaacactatttaatccgcctgacacgagccctactggtacatcaacaattctagtacctaaagcaacgacatcgttacccaagctttgaatcagtaaaggtgtattgcgcctattgcgcaagctaacactcccacccaaaacggataaaataacaactactataataaatgctgataataactttttattttgcagaaattttttcattaagaattgatcctatagaaaaaccggcaacagccggcttttttattatttgcgacttctacgcattacttcaatattcttgagtgattcaccagtaccaattgctacacaatcaagtggatcttgagcaataaacacaggaaccttagttgcttcagaaataacttctggcaaattcttcaagagtgcaccaccaccggttaaaacaataccatgatcaataacatcggcagcaatttctggtgaagtttgttccaaagtctccttaatagctacgataatgtcttgaactacatcttgaatagccttggcaacatcaactgcttcaatatcaacagattttggtaaaccagttactaaatcacgaccacgaatattcattgattcaatttctttagccttttcaactgaagctgaaccaatttgaattttaatgtcttctgcagttctttcaccgattaataagttaaagtttgagtgaacatagttaacaatcgcattattaaacttatcaccggcttgacgaattgaagttgatgaaacgattccacctaatgaaattgtagcaacatcagtagtaccaccaccgatatcaacaaccattgaaccagtagggtccataactggaagaccagcaccgattgcagctgcaaatggttcttcaattacaaatgcttcacgagcacctgcaactctagctgcatcaattacggcacgcttttcaacttcagtaacacctgaaggaacacataccattactgaaggcttggaattaccaacagtcttttccataaaatatttaagcattgctgcagtagtatcgtaatcagcgattacaccgtccttcattggacgaatagctacaatgctgcctggtgttctaccaatcatttcttttgcttctgaaccaacggcgattacttcgcctgtttgtgtattctttgctactactgaaggttctctaagaacaatgcccttaccttccatataaacaagtgtattggctgtacctaaatcgataccaatattctttgtacctaatccaaacacaaaaatctctccttaactgttgcggtctctaaatcttgactaattatagcatactataactttaaaggcgcctttcacacaaattttaaagaactttaaaacaatttttctcacgcaaacttaaatattgaccttctcccacgataaaatggtctaagaaatcaattttcatcatttttgcagcttgacgtaaactttcagttaattccaagtcacttgcagatggcgttaatttaccactaggatgattatgagcaataaaaattccagagcagccataaataactgcccaccgaaaaatttcccgcggatgagcaattgatctattcaaagtcccttgaaatagtttcttctcagcaataatgtggttgctattgtcaatatacaatgcccacaattcttcctgcttgtgtcctatcagcttatcagctaaatacgtacctacttcaatgctagatgtcaaaattgtctttctcttaggtgaagcgcagcgcaaacgatctagtactgcctcagccgtaatagcaagttcatccgagcattctgaactggtaataaactttaatagatcattaaacgaatttaaccctgtgtttttcagaaaaacatttaagtcctgcaacgtatgaattcctttattttctagttgttcaaataattgtgtcaatagctctaaatctgttttgacaaagtaatgatttggttttctttttaacataaaatccccctcattacttattacgcaaaaaagagctaaatttttttcagaaattcaaaaaagttttgacaaatcatcgttgcattctgcttatctttaacagatggtgctttcaaatctggtaccatcacacattttaaccctgcattagcagctgcttgaacaccggttgatgaatcttcaaaaactaaaatattttctttaggtaaattcattttcttagctgcttctagataaatatctggtgccggcttagccttaatgtgacctctttgtacatcaagataactaagatgaaaatcaaaataatttctgattccagtcacccacatagcatgctgaactacattttcataattacttgaagcaatcgccatcttcaagccacgcttttcaaattcgtctaatgcttcttgaacaccaggttgcagctttaactttccctcatcagtccattgccacaccaagtcatcagttcgcttaataaaacgatcacggtctgcttcagttttaaaatatttatgataaaaatcctgcatctctttaactgtagcaccagttaacttgagataagcatcccgcggcgtgcccaaattctcttcttctgccgcctgaatattagcatcccaatacagcttctctgaattaactagcaaaccgtccatatcaaagataatgccttgaatatcatcatctagcccttgtacgcgcatcacgttttcctttccaatttaaaatagcactaaccaaataaaaggatccactaacaattaaaatatcattagctcccaagtgatctcgcagctgggtaaaagcagctcgataatctttttcataattatatcttttttgtacatcaattggaaaatcatcttttttagctactcgcggataagataaagttgtcagtaaaacttcatctttatcatcaaacaagctaaacacctgctcaagatccttatctttcatcatagtcactaaagcataaagcttgccatgcttttgctgggtcatacgatgaacgactgccagcaaattactcattgcctgaatattatgtgctccatctaaaatgattagcggattttctcgtaaaatttgatagcgccctggaataatcgtttgattaatcgctgtttcaacttcttcatttgataaaggcagtttcaacaaaaagaacgcctggcaggcaacggcaatatcataggcttcaacttgtggtcgtaaagcaaaaactagctttcttttgtgatcttgataaacaatttgattatcaagcaaaacactaaagtctcgtcctaattgataaactatcgcatgttcttcttcggctttacttttcaaaattggccaaacaacttctggcacgttacctaaaactactggtctttttgccttaataatgccgcttttctcacgtgcaatatcctgaattgtaggtccaataattttttcatgatcgagaccaattgtagtaataacacttacttctggcataattacattagtcttgtcatgttctccaccaattcctacctcgataacagcataatcacactttttttgagcaaaatagacgaaagccagtgcgacttcatattcaaaggttactaacgaaaaagttgagtcctgctgctgcaatttctcataagtaccctgcacaatattagctgttttaactaaatcctgatcactaatattttgattatttaactgtattctctcattaaattcatagacatacggtgagacaaaaaggccagtcttttgaccagccttttttagtaggtttgataaatagtatgaagttgaacctttaccattagtgcccgtaatgtgaatcgttttaactagatcttgaggattgcctaattccaacaataaccgcttaataaaagacaaattatttttaggatgtaaatgaggcaaagcatataagtaatcgattacttcttgagctttagtaaatttcaattatttactctctttcaaatcttgaattctttcacgaacaccggctaattgactttcgtagtcagccttcttttccttttccttgttgacaacagcttctggagcgtgaccaacaaagcctttgttagccagcttcttttcacaacgagcaacttcgtcttcaagacgcttttcttctttttccatcttttctagctcatcgtcaacattaacaagttcagttaatggaacaaaaatttgtgcgcctggaattacagcagtcttagctaattttggtgcttcaacttcactagctacagtcaattcctttggatgtaagaagttttcaacgtaatcagcattttcgtccaaaacgcgcttgttagcttcatcgtctaattgaatcatgatgtcgatttgacttgacattggtgcattaacttccatgcggatgttacgtactgctttaatagtttcaattaagaaggccatgtcttgatctgcttgcttgttttcaaattccttgtgagtagttggatattcagcaaccataactgacttaccttcatgtggcattgaaagccataatttttcagttacaaatggcataattgggtgaagcaaacgcaagatttggtcaagaatccaaattaagttttcttgctttcttgcctttaattcttcatcgtcaccattcaaagcaaccttagaaatttcaatataccagtcacagaagtcattccaaataaagttgtaagcttcacgaccagcttcaccgaattgatattcatcaaacaagcgagttacttcactaacagtatgattcaagcgatcgaaaatccaacgatctgataaatcaaatttagaagcatctggcatatgagctggtttagcatctgctggcaagttcatgattacaaaacgacttgcattccaaatcttgttaatgaagttccaagcagcagataatttcttaggatcataacgagtatcttgaccaggagcagtaccattaagcaagaaccaacgaagggcgtcggcaccgtatttatcaactacatccattgggtcaacaccgttaccaagtgatttactcatcttgcgaccttgttcatcacgcattaaaccgtgtaaaacaacatcattaaatggacgcttgccagtaaagtgcaaactttggaacatcattcttgatacccagaagaagataatatcgtaaccagttaccaaggcattagttgggaagtagcgcttaaagtcttccgcattagtatcaggccaacctaaagttgaaaatggccataatgcacttgagaaccaagtgtcaagtacgtctggatcttgttcccagttttcaatgtccttaggtgtttcttcacctacataagtttcaccagttttcttattgtaccaagctggaattcggtgcccccaccacaattgacgtgaaatacaccagtcgtgaacatcttccatccagtgatcaagagtttgttcaaatcgttctggaacaaagtttactttgccatcagtcttttgattttccaaaactttgtcagcaagtggcttcatcttaacaaaccattgcttagaaagacgtggttcaacttgaacgccagaacgttctgagtgacctactgagtgaacaattggttctatcttaatcaagtaaccttcttctttaagatccttaactaaggcttcacggcattcaaaacgatccataccagcatacttgccagcttcttcgttcatcgtaccatcatcgttcataacattgattctttcaagattatgacggttaccgacttggaagtcgttagggtcgtgagctggagtaatcttaactaaaccagttccgaattctggatcaacgtgttggtcttcgataattggaatgtgacgaccaacaagtggcaagatcaattctttgccaacaatatccttgtagcgcttatcaccaggtgctaccgcaacggcagtatcaccaaacatcgtttcaggacgagtagtagcaatttctacataacctgaaccatctgcaaatggatacttaatatggtaaaaggcacccttatcatctttgtgaataacttcgatatcacttaaagcggtttgaagtgctggatcccagttgatgatgtattcaccacgataaattaagccttcattgtaaagctgaacaaaaacctttttaacagctttagaaagacccttgtctaaagtaaatctctctcttgaataatcaagtgaaagccccatcttagcccattgacctttgatgattgatgcgtattcatctttccaatcccaaacctgtttaacaaaagcttcacgtcccatttggtgacggtctttgccttgtttacgcaattttgcttcgaccttagcttgggtagcaataccagcatggtccataccaggaaggtaaagagtatcatagccttgcatccgcttaaaacgaattaaagtatcttgaattgcagtatcccaagcgtgacccaagtgcaacttaccagttacatttggtggtggaataacaattgaatatgggtgagcttttttgttacctgatggcttaaataaatcttcatcaagccaggtttgatatctacctttttcaacctcgtttgggttgtatttaggtgctaaatctgtcataaaattcctccaataaaaaagtcctagacatattgtctaggacgatcagttaaaccgcggtaccacctacgttaagcatgtatcaaacatgcttctcttgaagacgataacggcgtataccggattaacctactttttattttcaattaatcagctaatcaagctactagtcaaccttcggcctctcagctgtctggcttttctctgttaataaagtcgacccctcttgattcttgctttggttatgattatagcatgaacttcactcagaaaaaagggttaggaattagtcgtaattaagttagccatatgtctttattcttttaataaatcagcaatacatttttccgatgaatgatattgcttatattgttttaacacgttgattaaatcatcatagtgactattccaaaaataataattttcatcataagatttcacactcttaagatcgttataatactgcttaacaaaatcactaggcttcactttacttttatagttatttgtatatcgctgatagtcttgatgataaagaatgtctagaatttcaatctcaggtctagtacgaagttctactacttcggatactttctttttatacacttctggaagattaaacttttcggttttggaatcaagtatcctataaattttaacctttctacttctaaaccctttattcaaaaattctttagcaaactttttagcatttcgtgctctaattacttcaccttcaagaagatcatcctcgttgaattttagtgcatcgtgttccaatagaacttccataattgctcgttcagtatgaccttctacaataatagcgattagatctgtagagttactcatccattttaaccgccttttctgtagccttctttaaagccatgtaggcatcataatctggagctgtcccacctaaataatctgattcaaaaacatcggctttatttagatcgcttcttacatcagcagttgaatatctttgaagctgaatcttgccttctctcttagtaatatattcttcatcagttctttcaattttatccaaaatttcagtatagtgcgtactaaataccaaagtagctctatttatgttgattttaggattagtaaaatactcaataaaagaatctacaatagcgtgattaaagtgattctccaactcatcaataaagatgatgccaccaacggaaagtgcattaattacctcgccataaagagttatccctttagctgtaccagaagacaagtattttgcaatcgttgtaaaatcattttctgcaatctctgtatctttccctttaaacttcagcttaaacaattgtttagtagcaccagagccctcaggcttgttttcaattttaagatattcaattgttggatctaaaaagtttaaaatttctccaggcacattgccagaaccatacatcaatgcattaaagtcagtaaagaacaaagtatcaaatggtatttgaggataatacttatttttcgaaataatcgctctaaaaatcgaatcatcagacgacaaaattgaagaagctaggtcgcctaattcttttctgtctaattctggttttatatttttgaaatcaaataattttttctttgaaagattaacagttaccttttttcgatataccgtttcagactcaatatgccagcttttacttaaagttttctttaacttgaaaactaaactatccttataaactacatgatcagttccataaaaataagttgtaacactaataggctcatttcctattagcacatccgttagcttagtttgatcaattgacttttccatcacaactgtttgaagaattcctatcaagagtttcatgatcgtagtctttccagtagcattagtccctactagagtgattaaattattcacccataaactgccgagcaaatgagttaatcgatcagaggtattagaagtaacccttgcatcactgaccagtgaaaattcaagatcatcctcaaatagcggatgattttgaatttctaattttaaaaagtataatttatttttattcataattattcacctaaaattgttttattcaggctaaattttatcatatttttgcattttatacataaaatctgtttaaaatataaataatcctcatcaagtagttactacttcatgaggattatctaaaatattctactttctaatcatcttaactgcttgaatcaaaatcgttggaatcagagccaagccagcaagccacattacttcttgcccagttaacggagtaactgcaaacaagctatgtaacgccggtacaaacaaaatcaaggctaacaaaattgttccgacagcaaatgctgctaaactgtaccagttatttttgaaaccgatcttgaagatactgtgttgtgaacgacaattgaagccatgtaaaagccgagcaaatgtcaatgttgagaacgccatcgtcgttgcaactgcaggactatcttttagtccgatcaaaaaggcagcaattacactaatcgaaatcaacaaaccttgaatagtaatttgactcacaaaggctttgtccaaaataccagccttaggatcacgtggcttacgtttcaaaatatctggatcacctggctccattccaattgctaaagctggaagcgaatcagttaccaagttaataaagagcaattgaaccgctacaaatggtactggtaagccagcgagtgaagcaaataaaacagtgataattgctgaaaggttacctgataacaagtagccaatagcgtttttaatattttcataaactgttctaccgttagcaacagctttgataattgtggcaaaattatcatcggccaaaatcatgctggcagcatctttagatacttcagtaccagtaatccccatcgcgacaccaacatcggccttcttcaaggctggtgcatcgttaacaccgtcaccggtcattgatacgatacgatcttttctctgccatgcattaacaattctgatcttgttttcaggcgatacacgagcataaaccgaaatcttctcaatgttttgatcaagttcttcatcgctcaaagcatctaattcaaggccagttaaagccatgtcaccttcattgaaaataccaattttcttagcaattgcaacggcagtcaccttatggtcaccagtaatcatcacagtcctaatcccggcttccttagcacgagcaactgcagctacactttcttcacgtggtggatccatttctgaaacaaggccaataaaagttaagccatcttctgcttcagtagaaagctcttcatcactttctttataagcaaaagccaaaacacgcaaaccattttctgaaaagtaattgttttgtgccaaaatttctttacgatcttcttcagtcattggacgaatttcatcgccgaaacgaatattgacacagcgtttcaagagcacatcaattgcacctttaacaaaaatagttggtacagtatgaatcaaatgcttagtactcatcagcttacgatctgagtcaaatggtacttcttccagacgcttagaatgttcgcgtaattcttgttctgataagcctaaaacaccattacctaagtcaattccgggcacttgacgatacatttccagcaaggctgactcagtcggatcaccaattgccttatcttcggccaaacttgcatcgttgttaagcactacatcataaagcaagtagcggtgaagttgattactcaaatccagctcatttggctttaaaactttaccaccaatatagatgtcctcaacagtcatcttattttgagttaacgtaccagtcttatctgaacaaattactgatacagaccctaaagattctacggctgccaagtttttaataatagcattttctttagccattttttgcgtacccattgcttgcacaatagttacgatagaactcaaagcttcaggaattgcagcaacagctaaagctactgcaaatagcagtgaatcaagcagcggttgaccacgccacatttgaataccaaagatcacagcacacaagattaaaatagcagtagccaatcgtgatgaaaactggtcaagtgatacttgcagcggagtgcgacgttccttagtttcattcatcaaggaagcaatcttaccaatttcagtctgcatccccgttgccgttaccacaaccgtagcacgcccataagttactaaggaactggagtaaaccatgttaacccgatcagctagcggcacttctttttcaaaatcagtgtccaacttgtcaacattagtcgattcaccagttaatgaactttcgttgacttgcagagaataattttctaaaattcgaccatctgcagtaactaagtcacctgcttctaacaaaagaatgtcgccaggtaccaagtccttggcctcaatctccattttttggccattacgcaaaactttagccgttggcgcagataatgactttagcgattctagcgacttttccgccttaacatgttgtaccgtacccaaaatcgcattcagaatcaatacaacaataattaccaacgtactttccagactgcccgtaaaagcagaaattattgccgcgataattaggatgatcaccattaagtctttaaattgttctaaaaagacctgaaaagtaattttcttctttccttcaactaaagcatttggaccaacttgagctaatttctcttgagcctctttagcgctcagcccctgctttaaatcggtatttaactctttagctatctcgtcttttttctgacgatagtattccatgtaaagccctccctaaacataagagtaatttaagcaaaaaaatagagactactggctaaaacactgtttagtcaatagtctcatcatttaaacttacagcggaaaataaatttcgttctgacgccgtaaatacaatttatgccgattactccctatttacttgtacataattaaaccatatcaagtaggtagttggcaagctattttaactttcttttaggaagttttctaattgttcatcggtaaaatcagaaccgtaattttgttcaaggagatgcatgatctcttgcttggtattaccagttcttttaagtgaagaaactaaaattttgacgcctcgtttaagtccctcttctttaccttcctcacgtgcgtcttgttctcgctccagtattttctcttcgtagtccatgatataatcactccattccgagcaataagataatcatttgtacttcttatctttcaataatccgttagcaatatcagccgaactaactggtacaccgactaaacgctcattttgccacaaatcaaaaaaatcagctggcatcatttgatcaaattcatcatctgaattcattaaatccttataaacacgtgacttctcaaataaatttagagcctgcttaggataaatgtttaatctcttagcaattaagtcgctaattgcttcagctagttgctgatgaaattgcttttcactaatttcgggaatcatctaaccaactccttatctatgaacgttaaagctttgagagctctttctgtcttgaaacaatactgctccgaataaacactcggttttaattttagcagagcctcatctaaatctagattaccatgtttccagcaattaacaacagaaaaaagtttaccatctgctgttgggccaatgacgatatcagaattatcttttatattattcattctattttgaatgacaaacttaatccaatcaatatctgcttggtaaactaatattttcaagtcgggttgatcagcatcgaatacatatctatttaatgtcggttgacctgaatatctagccttacgctttgcccatttttctgcttgtctacgattagcagtcacataaaagccattaccaaaatcagttgtaaaaacatttttatttatacgaggctgataaacagcctgattgcttccatgatacaaaatgactttggtattgcttttcatgaatcgtgatgtatgcgtatttttcatcgcgcacctctttcataaatagtaggacaaaattatcctccactatttattacgcaaaaaagcacgatttttttgtgagaaattaaaataaaaaaagaaaatgcctgagaattatatcccagacattcaccaatttacggctctttctcatttctcttccttcacaatataaattggtcgttctttaacttgtaaatagattttaccaatataacggccaataattccgatacacaaaagctgcaaaccgccaatcaataaaataattgaaattgtgctggcccagcccaaaatacttgaaccaggaactattagtttacgaacaattacaaaaataagaccaataattgacaaaatgaatgaagttgtcccaatccaaacagctaagttaagcggtgcttgagaaaaatcagcaatcccgcccaacgcatatttgaataatttgtgagtcgtccaatcagtttcaccagctacgcgctcgacattgtggtactcaagatacttagtcttaaaaccaacccaagcaaaaatacctttagaaaagcggctgtattctttcattgataaaactgcgttaaccatctgcctggtcatcatgcgatagtcgcgtacgcctgaaacaatttccactttagaaatgcgattaatcaccttataaaattgattgctcaagaaagacttaaacttaccttcccctttacgatctactcgtctgcagccaactgcatcatagtcaccagtctgcaaaattttatacatttttggtaaaagtgaaggcggatcttgcaaatctacatccattaagacaatataatctcccgttgcagctgataggcccgcatagatagcggattccttaccaaagttacgagaaaaagaaatatagtgaacatgtttgtcctgctcatgcaattttttcaattcggtcagtgtgttatcattggagccatcatctacaaaccaatattcgggcgtcactttgggcattttagctaatactttttgcactgctggataaaaaagtggaattgtttcttgttcattaaaacaaggaaccacaattgataatttttccattagatttcttctttcttagcttttctaaaagtaactactttattaattacaaattgaattaaagttgctacaaaagttgctactattttaacgattaagtgcggataacccaatttagtaacgaaaataaatagggaaaccgtagtaaataccgtggtaatctgaccaacgataaaataagaaataaatcttaatatcatgcgatcatgaactttaaagttagtataagaattccataaaaagttattgatgatcccgcaggtagacgaaataatgttagctatttcaacattcatcttgaaatgcgtcaaaattgtataaattccaaaatcaacgactagccctaatacgccaattagaacatactttactaattgaacaaaatcttctgaatagattgctgttttgattttttccataattattcctaataaaaaatccagacaagaggtcctggatttcaacatatttaactaatatggtcttaattatatcattgtttttaagctctacgttttcattattaaagttaaaactttaataggaacaccttttgcattaattataatttttgtcattcaatctatctgtcttgttagtatcctcatacaaatgataggaactcttaatcttatgcctgccttgtggatcaaacatgcagagaaagataacatagcaacactttaaattttgatatgtgctgcatttcaaaatcatacagatttccatcaacatcctcaaccaaaatatcgagaataacagctttttgcttagggtgtttgggatcagcgacctttctctgcttctgcagataatgaatatctttaatctcaatctccggcaccagtccctgtaggacatgcttgcaaaaattcttgttagacataatctcaccaaagattacatcctctgtgaagccaaaccagggcttctttttcttgtgcgtattttccattgcgcacctctttcataaatagtaggacagaattatcttccactatttattacgcaaaaaagtgcaatttttttgtgagaaattgaagttttttaaagttttacccaactatatcttccaacttcaattccagatattctccccgctttaagttagcaggcaagcttaactttcccatcgaaattcgctctagctcaacgactttcatccctaccgcaccaaacatacgcttgatctggtgatatttaccttcacaaattttaatttcagttgtagacctatcgtgctcttcatcctgggataatatcttcaattctgctggctgcagtttggtcccatcgcctagtgtcattcctgaagcaaaagttttaacagttgcatcattagctacaccagcaatttcagcacgataaactttatcaacatgcttaccaggtgcaagcaattcatgattcaactgaccatcattcgtcaaaaggagcaagccagtagtatccttgtccaaacggccaactggcacgattccttgataacggtcctgcggtgcaagcaaggaaatcaccgttggctgattgcgatcttccgtcgctgacaaaacacctttaggtttattcaataagaaataatgatatttttgataagcaacagcatctccgttaacggtaacctgatcgctttctttaacttgctgctttggcgttttaacaatcacatcattaaccgcaacaattccttttttaattaattggtgtacttcttttcgtgagccaacattcatattggccaaatatttatctatgcgcattatgtctttctttcgttcttatgtgttgattaatattaattatataagaaagttaacccaatttcgaattgcgacactaatcaaaaacggtcgattttgttttcgaccgtttttacgcgcgttttgcgcgcgattatttgcttaaaatatattttgtagctctgccttcacccattcttctaatataaccttgtttttctagttgccgcaaaatcttcaaaactttcgtcctaccaaacttactcatttggctaatttgcttcgtagtatccgcaccttcatgaattatttgatatactttcttttcatcattagacagatcgtccgtaataaattttaaaactggcaatattatctttatcgaattatcaaaaatttcaaactgcggttgaaccaaactacttctataagaatcatttattcttcttacacctgtaccaaattgctcaattaatcctaacctaaagaaaacattagcaataattggattacgcaaaatggaaatctgacctgaaagatattcttctttgctaagtccttgtggcaatccacctggagatactacttcaattctgtcatcatacatagaaattttaatttgcgaattaatgttccaaactcgatgaactaaggcattggctattgcctcacgaaaagcttcttctggaatctgacttacaatatttcgcgttgctccctgtatttcttcatgttgataatattgacgatatttttgaattgcttgcttatactctttaagaatagattcatgctcataacttgctcgatcaagcataatattaatgctttcaccaaaccgaacaatatcaattccacgataattatttttgtctgccaaaagctcaccggcattagtgtaactagtatccttacgctctaaattaagcgtaatcaatatatcagatgttaaacttttaattcctatcttttcttttaatgcttcttctaaaatgttaaatgacaaattttggttcatcgcggttaaactatcataggttctattttcaccaattaagattaactgtgataattcagatcggtccacttcgatcgaagcactgtcattactcttataggcctttgatttgtataaatatggaggattaactccttgctttactgttaaagtaaccacattagttttaggatcaatttctaaattataatctggatttggtttgatcgaatcgttgattttattttcaacatttaaacaaaattcaactggatttttcacaccaacgattgatccatcatcctttattccaaatttaattttgccactgccataatttgcaaatgcactaaccgtttttagaaaagtattcgtcaatttctctttaaattctaaatttttggtttctctcatttaggtcaccgtttctaaactatttagttataattatactctttcacgcgcaaaaaaacggtcgaaaacgaaatcgaccgtttttacgcgcgttttgcgcgtgcctattatattaactttaaatcaatacataatactactagaagtttccatattaacaccatatctttctaaataattaaactgtatcatattaaatttcaaaaacaccagtgaaattaatcctctataacaagtcagcgtcttcttgagctttatcatccaagaatttttcatttggataaattggcgtaatctcaataccagccattgccctttcaatcaggccttcaacgtcaagacgagcttcatattcacgcgctttttccaactttggcttagtcttaggacgcggtggagcaaaaattgtacaacaatcttcaaaaggttgaattgataaatcaaaggtaccaatctcttcagctttggcaataatctccgttttatccattgttgcaactgggcgaataaccggagtagtagttacatcattgatagccaccattgattgcaaagtttgagaagcaacttgaccaactgactcaccattaaagatagccaagccgccacgttgtgcacgaatgcggtcagcaagctgcaacataaaacgacgttgcacagtcatcaaatagccttctggcagtttttccttgatcgtttcttgaatttcagcaaacggtacggcaataaaattaatcttaccagcgtagtttgccaaaataccagtcaattccttagccttagccaatgccttttcagtagtgtaaggtggactaaagaagtgaaccatttcaatatctactccgcgcttcaatgccagccatgaagcaactggggaatcaatcccaccactaagcatcatcacagccttaccagcagtaccaacgggcatcccgccaacaccatggagcaactgattagaaatataaacggcatcttgacgaacttcgattctcaagaccaaatcaggatgcttcatttcagccttcaagccatccatatgatcaaacaagtagtcaccaactagattattcaattgattagtgtcgtattcaaacttgtggtcactacgcttggtattaaccttaaaagtcattcctggcttaaaagtctcttgcatcaattccaaagaagtcttttcaatatcttcaagagtcttaggaatcttaattgctggtgagtaagtttgaattccaaataccttcttcagacgttggtcaacatccttgaatgatgcgccattcaggacaatgtgcatccgatcatgacgaggatgaaattcaatttgtgggaaatccttaagaactttttcaacgttacttgctaagcgattgatgaagtcctttctgttcttccccttagttgaaagctcgccatagcgaaccataacttctgtgtattccattaattttctcccaaatgattaattttagcaaaatgattatagatcttgtcaaagaccttaataaattcatccgcttcttgaagcgtattcgtctcatcaaaacttaaacgaattgcactagtagcaatcttatcatcaattcgcatagaaaccaaggtgctagcctcatctgccgtctttgatgcacaagcagaagtagttgaagtataaatatcttgatcttctagcgtatgaaccaaagtttcgccccgaattccctctaaagcaaagcaaagaatatgtggtgcaaagccatcgcttactggtgaaaaaatattaatccctggtttatcttttagataatcaacaattttagccttaatttctgcttcacgcttggccttttctggttcatcttctaaaagcaaacgaattgccttagccattcccgcaattgcaggcaagttctcagtacctgaacgcaagcccttttcttgaccaccaccatcgtgtaatggggtcagcatcttgccttcttttttatataaaatacctataccacgtggtgcatggaacttatgcgcagataagctcgagaggtctactcttggtgtaaaaaccttatcccaaatatttttgccaagtgcctgaacgttatcaacatggaactgaatcgttggataattttcaagcaaatcgctaatctcatcaattggttgaatggtgccaatttcgttattaacgcccatgattgaaaccaaagttgtatcagaatcaatcgcgtttcttaagtcattaacgttaactcggccttccttatcaactggcaatctggtaacgcgccaacccaaattctctaacgcgttaaaactattggctacagatgcatgttccacgctagaagtgataatatgcttaccaaattcacgcttttgaattgcagtccccttaattgcggcattatttgattctgttccaccagaagtgaagaaaatttcatgctgcttagtccccagcaaatcagcaatttgtttacgtgacgcctcaagcaattggtgtgcacgatcacccatcttatgcaaactcgaaggattgccccaaatattagtcgctactttattgtaagtatccaatacttgtggatctatcttcgttgttgcactattatcaaaataaatcactatcattaccccttcatttaaaaaacggtcaatcgcttgaccgtttcaagacttttcaattttagcttaaataatgaatcgcttcaattaattactcttctcttctgaataatatgcattttcaagtcgttgataactacctggctctaccttttcaattgctgtagcaattgtatcaagggcttccttatagttatattcattatatagctgcattgctgtcttttgtgcttgcgcaattgaatccttatctgcatatttatttgaatactgcatcgtcaattcaactaggttagcggaattaatgatgtcatctgcttcacgtttaagccgctccacatcatcagaaatttgaattaattcagctgagatcttttccatattaatccggacctgacttaattcgttgctgacatgaccaatctcgttgactaccaaagtgtacatttggacaaagctatcaggattgccaggcaaatttcgtctttcaagtcgacgataaactaatgaaacttcttgcttaaagcgcttgattgaatcattagctacattttcagaatcataaagtccatcaacgtcagttgacatcttagcctgctctgcatcaatttcacgcaggcgatctagcatctggagccatgaatcttgaatagcagagtaaacacccttaccatctgcgatattctgtgtatcaatagtgtactgatggtacatttcattgacttctttttctaagtctttactcttttccaattcgccatgagtcaattcatagctctcatcaatatgccgcaacttttctaccagtttctttgacgcggtttgctgatgtgagatcaaagtcagcattttactttgatttttttcaacaaatggtcttgccttgtattccttagctaaaacatcatacaggtcgtcaatttcgccagagatctttttattttccttggctaattcatccaccttagtctcagctagcaatttgcgcgcaccatcaatttcatcatgaatttccttgattctgcccaaaacatctacgctagtaaggtaatatttttctgaaatcatttttttataagcatcagacaattccttaagctgatcttggaacactacttcaagctgatgataaccctcttttagcggttttaagcgtttttgtaagttacccaaagacatccgaatcttggacaaaactcgcttagcttcaacatgatcaccttgtgaagaaagattttttgcttcttcaaagtcactctccattgatgctagttgatcttcaacctgatcaatcgcagcaccatattcaaaggaattggctaagatatcttttcttaattcacgataaactttaatcaaagcatcatattgaatttgattttccttatttgattcaagtagttccgtgaaaactgccttggtgttacgagcatcttcgagcgttggcttgataatctcctgtgcttgtttaatattctttcttgctttaaacaagcgataagttgcattttcattagcagcttcttcaactagcttatgcactcgcggtaattttttcttagctgcttcagtgtagctcttgcgccaagtatttaatgtagttaaactttcgccggccaaatccattttatccagtcgcgtaatatcatcttctagatgcatcttctcaatttcagtcactgctgcatcaatcgcttcaatttcttttagttgtttacgattgatcattagcattgctgcaactacgacaatgattaggatcaccacggcaataattataatagcttgaattgatgacatagtttatcctccaaaactatcataattataacaaaacctgaccctaataggtgcaaaaagctgttctattttcttgatttattattctgaactctatataatactattcgtgtaaaatatttgcagcaataagtgacaagaacgtcaacatcttgaaacgctttagtgaacgagtaacccgcgctgcattgggcgaaaatgtaaatccaagatgcacgaatgttgaacttatgcttaatattttactccaaaaattattgtttaaattttatggaggattttttatgtcaagatatacaggtccaagttggaaacgttcaagaagattgggtatttccctttcaggtactggtaaggaaatttctcgtcgtaactacgctccaggtcaacacggtcctaacaaccgcggtcgtttgtcagaatacggtcaacaattgcacgaaaagcaaaagttacgttggatgtacggcttaaacgaacgtcaatttagaactttgttcacccgcgctggtaagattcgtgaaggtcaacacggcgttaacttcatgattttacttgaacgtcgtttggacagtcttgtttaccgtcttggtttagctactactagagaacaagctagacaattggtaaaccacggtcacattactgttgatggcaagcgtgttgacattccttcatacgaagtcaaggttggccaaactattggcttgaaggaaaagtcaaagaacttacaacaagttaaggatgccttagaagcagttactgctcgtccatcatttgtttcatttgatgaaaacaaaatggaaggtactcttgtacgtttaccagaacgtgacgaaatggaaccagaaattgatgaagccttagttgttgaatggtacaacaagttactttaatttttacattttattttgtcgaaagtctttctcaatcgagaaaggcttttttctttgctacaataagtacataaaaagaaaggatgattagatgactgaagatttaaataaacgtgttgaacaagcagctcaaggtattactccacaaactaagcctgatgaacgccgcagatttttaggttcattacgtgagcgctgcttaatccgtatggacaatactgaagttaaaaatcctgaattaactgccctatttcttaaacatatcactgactttaagggctatactattttgatcaatggcaatatcactgatgatggcttcttgggagacattgaagccagttgcagcaaatatgatattcccttcactttagttaacaatgaaaccgcaaaaacaggaccacatgatacggcagtactagttgtagcgaaaaacgctatcaatcgaccacgaattgagctaaagcaagtttatccacctgagtttcctaaagaagaattagccgcacctaaaacaaaagaaagtttttggcataaactttttcacggagataagtaaatgaaaccattagcatatcgtatgcgaccaactaatttagacgaagttgttggtcaaaggcatctgattggtccaggcaaaattattcgccgaatggtggaagctagacttctgtcttcaatgatcctttacggccctcctggcatcggtaagacaagtattgctagtgctattgcaggctcaactaaatatgcctttagaaagctcaatgcagctactgacggcaaaaagcaattgcaacaagtagccgaagaaggcaaaatgagtgggacagttgtcttattgctggacgaaattcatcgtttggacaaaactaagcaggacttcttactgcctttgctagaatcgggacaaatcattttaattggggcaactactgagaacccttatatttcgatctcccctgctattcgttcacgttgccaaatttttgaattaaagcctctttctacagatgatgcttctcatgcaatcgatcgcgcattgaacgataaagaaaaaggtctaggcaaatataatgttgaattaacagatgatgcgcgtgctcttttgattgaaaaaggcaacggtgatttgcggtctactttgaatagtttagaattagctgttctttcaactaagcaagaattgcaagataaacaccaagatgatcaaaaaattatcatcactcaaaaagaaatggctgattcaattcaaatgaaggtgcaaaactttgatgcttctggtgatggacattacgatctagtctcagcatttcaaaaatcaattcgtggctctgatacagatgcagcgctgcactatcttgcccgattaattgaatctggtgacttagtctctatctgtcgaagactagcagtaattgcctacgaagatattggactagccgatccagacgcagctgaacacgctatagtagccatccaagctgcacaaatggttggcttgcctgaagcacgaattccactggctaatgcggttattgagttagctctttctgccaaaagcaatagtgccatttcagcaattgatgctgcactagctgatattcgaaccaaaaaagttgactcaattcccgccaacctaaaagatgctcattactctggtgccaaaaagcttggacatggcgtgaactacctttatcctcatgattatcaaaatgattgggtagcacaacaatacttgcctaataacctgcttcatgccagctactttgcacctaaaggcaattctaaaatcgaagctagatataaggcaacctatcaaaaattaaaacaaatgcagtctgataacttgcgcaataatcactaatctcgcgcattcaatatggttgacaagcacctgtaatatgcgtattataataagtgatctgagttgatcgacaagcttaaatgtataaagttgaccgatcaaactataagacgtgggagttggcaaataactaccgaatcggaatactgccttgttgcaggatccatattcgctgcgatgccagctaaaattttgaacattgcgggttcaacaagcgtcattatgctatgtttagtcaactcggatttctttagaatattaaaaaaggcggtctcaattgaccgtctttttctatagtggagactgttaaatggcaataaagattgtaatgattatttttatccttctcctactgttaacctcgtggtacatgtggcacagaaggaacggacattttttaatttatgacattggtggcgatccacgcttgagcaatattcttaagtggacttcagtcgcccttttagctgaaagtattttagggattattttgctattcatgggtaataaatatttaaatctaatcaccttattcttagcttcattaactattttggcttttggtttatcaattactcaaaataaagaataataattcactaatgacaagcaaaattttggtaaaatagaatatagaaagaggtgcttatatatgctttcacaatacaagaatattcaagttgcagttgatggttcaaaagaagctgacttggccttcagcaaggctgtagccatcgccaagcgtaaccatgcaacactagaaatcttacacgtaattgatactcgttctttccaaaatgtttcaagttttgattcagcaatggtagaacaagtttctaaagatgctgaaaagagaatgaaggattaccaagctcgtgccactaaggctggcgctgaagatgttcactactctattgaatttggttcacctaagacaatcattggacatgacttccctaagaagcacaatattgatttaatcgttgtgggtgctactggtttgaacgctgttgaacgtctgctcatcggtagtgttaccgaatacgtaaccagaacttctaaatgtgacgtcttggtatgtcgtactgaagaagttaaggatgctttgcaaggctaattatttagctttaataaccgataaaaaaatacctccaaaattcagatttgaatttttggaggatttttttaatgttatttctaaaaatcgccagccgtactgaacatgtaatcacgattatggaacttcatcgacaagattaatccaatcccaatcatgtttcccatcagagctgaaccaccctgagaaacaaatggcaatggaatacctgtcaatggcaataaatcaatattcatcccaatattttcaaatacgtggaacaagatcatcatgataacaccagttgcaatgtatgaataaaagacatttctggtatcgaacgagatttttaccatttgaataatcaggtataaataaatcaaaatcaatgctacacagccgacaaaaccaaagttttcaccaattaccgagaaaaccatgtctgatccacgaactggaacataaacgctagctttgccaaaaccattaccaaatagttgaccagaaccaatggctttcatactttgccataactgataagctcctgatgaagtatcaccagatggatcgagccaagacttaattcgttcaaattgatatgcttgaaagaaatgactcaacaatgattgcccagccgacgtagttactaatacaataaccccaatagctgctaaaatcaaaataccatataacggtacaataattttccaagaaatccctgatactaaaaccacgccaccaacgatggcaataaatactaacatagtaccaaagtcattctgtaactttagtaaaattgctaccggtgccagccaagcaataattttgcctaataacaaccaatcggtcttaatcgtgtgaccatatttatcattatgctctttgaccactcgagccaacatcaagataaaagctggcttcataatttctgaaggctgaaaagtaatcggccctagtttgaaccaacttttcgcacctgtatctgcagctacgcttctgttatataagaatagcaccgcaatcagcaaaaatattccgattccaaagaaaattggcgcaatcttaaacaactgttctgcatcaaactgcatcacaaccataataattgcaattgaaatcaagtaccataatgcctgcataactactgccctaacaggtgaaccaatatgactaggatcacctaatgcagcaacatagatacaatacaagctaattaaagccaagagtagcactggtataataatattccaggctaatcgatcgaatagacttgtttcattttcaacttttgccattaaataatcactacttatattttatttttcatgtaaggtaaagtatgaaagtaagtcattaatgctgctttcaagactgttagcaaacaaaatattgcttgtcttagaagtagtagcacgataacgcccctctaccttttcaattaaaccaatggactttctattaggaataacaacttcccacgttggcaaattctttcccttaagttcattaacttcaatatcaatattctctaattttttagacataaatcctcctacttgctatccggatgaaattttgaagcaataattggatcttcatatctctccggatgtggatttcgaaaaatagtaaaattatcaggaactggatccactccacccttgataaatgggttacaccttagtatacgacaaattcccataatcagccccaaaataggaccatgttttttcaatgcatcaatcatgtaattggagcatgttggataataccgacaacttggtggtagtaaaggtgaaatcactgtctgataaatacgtacaataaaaatcaaaatcttacgcaagtaatctcctcacttagtgtcgttgatgcttttcaatatttttaagcaaagtacctgttcctaaagcaactgcttctaatggatgatcagcaattaaaactggaacttgcaaataataagaaatcaacttatcaatattctttaatagggctccaccacctgttagcatgattccgcgatcaataatatctgctgaaagctctggtggagttgtttccaatacttctttagctgctgcaatgattgacatcaagcctggttctaaagccttttgaatctctggtgcagtaactgtagtctgcttaggcaaaccatcaactacgtcacgaccacgaacagtaatttgttcatcttggtctggttcaaaggcgctaccaatttcaatcttaatttgttcagcagttctagaaccgattaacaaattatgcttactcttaatgtaactgatgacagcctggttcatccgatcgccagcataacgtaatgattgagaagttacaatttcacccattgataaaactgcaacgtcagtggtacccccaccgatatcaatcaccatattaccttgcggtttaaaaatatccaagcctgcaccaacagccgcaactttaggttcaaagtctaaataaaccttgccgccaccagacttttcagctgcctgaataattgctttttgttcaattgaagtaactccagtaggagcacaaatcaaaatatttggcttggacataaagccttttacatttaatttttcaataaagtaagacagcattgcttcggtaatgtcaaaatcagcaattaccccattcttcaaggggcgaattactcgaatattacctggagttcttcctaccatctcatatgcctctgaaccaactgcaactaccttgtttgtatcggtatttacagctacaacagaaggttcatttaatacgatacctttaccagagacattgatcagtacgtttgctgtccccaaatcaattcctatatctcgtgccacgataaccctccataattattcaccgtccattttaccataaataatcatgactttcctttactgtccttgttttaacacaatctttaaaacaaattactcaattgcattgaagtatcgataaaagtaatgacaaaattgccaactaaaaagcctaagccaattgcaataaataaatataataattgcgtttcaaaaacatggcctttacgaataattttatctagttgaattgctttaactgcttgaaaagataagccaatcgcaatcaaatatataatgatactaataatgacatgaacgcctaattgaaacatatattttcctcaattttgacaaaaaaagacggatgcagcattttgtgcattcgtctcttccttcttctagtgacctttagtgttgtacacgctaattctgttcattgctcgtcttaaagcaacttcagcacgtgccatagtttgttcgtcatgtttttcccgtgcttccttcaaacgttgctcagcgcgttgcttcgctgcctcagcacgagaaacatcaatgtttcttgcgcgttcagcactatctgcaataatcgtagcaacattattcgaaaactcaatatagccacccgaaatcgcaatatgatcaactactgaatccatttcacggcttcgcttaatcttaacctcactaataactagtggagttaaaagtggtacgtggttatacatgattgaacgttcaccatcaacggcacgtacatcaacgatacttccacgatgtgaataaatcattccattaggagttacaacatctactttaaaaagcttctctggatctgccatttgacatcaccctacttttctagtaaagctttagcttctggatcacttggagttacacccatttcttgtgcttttttcaaaacatcttcaattgggccgacaccacgaaaggcatcttctggtaagtcatcaagatgaccatccaaaataagcttaaagcccttaatgctttccttaattggaacatatgaacctggtacaccagtaaattgttctgcaacaaagaagttttgtgacaagaagaattggaccttacgtgcacgtgcaacgatcaatttttcttcatcagacaattcatccatacctaaaacagaaataatatcctgtaattcatggtaacgttgtaaaacatgttgtactcgagtagctacttcatagtgttcttcaccaacaacttcagggtcaagggcacttgatgaagattcaagtgggtcaacagctggataaataccttgttctactaagctacgttccaagttagtagtagcatccaagtgtgcgaatgtggttgatggagctgggtcagtatagtcatcggcaggaacataaacggcttgaattgaagtaattgaacccttcttagtagaagtaattctttcctgcaattgtcccatttctgttgctaaagttggctgataaccaacggcacttggcatacgaccaagcaaagctgaaacttctgaaccagcctgagtaaaccggaagatattgtcgataaagagcaacacgtcttgaccctcaacatctctaaagtattcagcaagtgtcaaaccagttaacgcaacacgcattctggcaccaggcggctcgttcatctgaccaaataccatggccgttttacttaaaacgcctgaagctttcatttcgaagtaaaggtcgttaccttcacgagttctttcaccaacaccagtaaatacggaaataccaccatgttcttgagcaatgttgtgaattaattcctgaatgatagtagtcttaccaacaccggcaccaccgaacaaaccaactttaccaccacgtacatatggctcaagcaagtcgataaccttgataccagtttcaagaatttcacgactagtagtcaagtctgcgtacttaggtgcttccttgtggataccttcacgagggtgatcttttgaaaattctggaccaccgtcaattggttgacccaaaacgttaaacacgcgtcctaaagtatcttcaccaactggaacggaaattggaccgccagtatcttcgactttcataccacgacgaagaccatcggtagattccatggcgatcgttcttaagacaccatcaccaagctcaagtgtaacttcaaggacaatgctttcatcctctgacttaattacacgcaaggcattgttaatatcaggtaaattcttatcaattgggaatttaacatcgacaactgggccgattacttgaacgatttcaccttcactcaaaacatctacctccttttctttattactctaaggcatttgcaccactgataatttcagtaatttcagtagtaatttgtgcctgtctagcacgatttaattttgtagttaagtttgataccagatcattagcattatcagtcgcactctgcatggctgtcattgaactagcatgttcggcagtcttagcatccaaaatagcaccgtaaatagtagaacgtgcatattgtggtaacaacttcattaacacttgatttggatctggttcaatatcgtattctaattctttatgtgcttcagcttctttgacaccaatatctaaatcgacgattggtaacattttttcaacacgaaaagcagatgataatgagttaacgtggtgagtataacatacgtaaagctggtcatagacaccattcaaaaacatcttaattgcggttgaaacaattggtaaggcttcatcaaaagttggtacatccgaaacaccattcttttcataaacaacgttaatattgttctttttaaagaattgtgccgcaaccgaacctacagcaagaactttgatatcgtgtccttgagcacgttcgtcctcaaagatactcatcatattcttaatgacattgctgttataagaacctacaagaccacggtcacctgaaattaccaagaaacctgttgtcttgatattcttacgtggctgaatcatatctgccgtaatccccaaaccaaagacatcagtataatcaatttgagcaacattgttcttatcaattgagacgtctttttcacgtatattatcaactacttctgagctaattaaacgagaaatagttctacgaatatggtcgttataaacggtataacctttatcacgattttcagtttggttcaactttgaagcagagaccattctcatagcttctgtaatcttaccagtttgttttactgaagcaatttttttctttaactcaagtaaagatgcaggcatattctacctcctatttctcacttggtgtaaagctctcactgaattcttcaattgctgctgacaatttcttatcatctggcaattgactagtttcacgaattgtcttgagcaaatcagcatgactgctgtcaaagttatcaaataattcgttttggaaacgagcaatatcttcaactggaacagcgtcaagatatccgtgagtcaaagcataaagaatcacaacttgcttttcaacaggaattggatcatgaagtggttgtttcaatacttcaacggttctttgacctctattcaacttagcttgagtagcttgatcaagatcactaccaaattgagcgaaactttcaagttcacggtaagctgcaaggtcagtacgcaaagtaccagcaaccttcttcattgccttgatctgggcgttaccaccaacacgagaaactgagttaccagcatcgatggctggacgagtaccagcaaagaacaaatcgctttgcaagaaaatctgtccatcagtaattgaaattacgttggttggaatatatgcagaaatatccccagcttcagtttgaataattggcaaagctgttaatgaaccgccgccaagtttgtcattcaacttagcactacgttcaagcaaacgtgagtgtaagtagaaaacatcacctggataagcttcacgaccaggcggacgacggagaagcaaggaaagttcacggtaagcgacggcttgtttggataggtcgtcaaatacgattaatacatccctgccattgtacataaattcctcacccatagcagtaccagcatatggtgcaatataaagcattggtgctggctcacttgggcccgcttcaacaacaatggtataatccattgcgccaaaacgctttaaagtttctacttgagttctaacggttgattccttttgaccaacagcaacgtaaatacaaattacgtcttgccccttttggttaaggatagtgtcgatggccaaactagttttaccagtcttacggtcaccgataatcaattcacgctgaccacgaccgattggaactaaggcatcgatagccttaataccagtttgaagtggttgatcaactgattgtcgatccataacccccggagccttggcttcaattggacgactcttgtcagtcttaatttcacccaaaccgtccactggttgacccaatgggttaactactctaccgattaaggcgtcaccaacaggaacttccatgattcgtccagttctttgaacacggtcaccttcacgaatattgtcaaattgacccaaaataatgatacctacatcatttgattcaaggttttgtgcaataccgtatgagccgttatcaaacttcaataactcaccggacaaaacatcgttaagtccgtgagcacgggcgataccatcaccaacataagttacaacaccaacttcgctgatgtcgagcttatcgtcgtaatgttcaagttgttgcttgatcaaggaactaatttcttccgctttaatgctcaatggtttcacctcttttaatttttatcaattatctgcgcacggatcttcttcagtttattcttaactgatccatcaatcacgcgatcttctacttgaagaaccacgccgcctaaaatacttggatcaactttattctctagacgcaccacgtttaggttatatttcttagcaaaactttcacctaaacgcttgagttgatcatcatctagcttaacagccgtagttgcaacgccagatgcgaccttcttttcattatcataaagtaagacaaagcgatcaataatatcgatcaaatcagcaaaacgatcatatttaaataacaaattcaaaaagttttgaacctcatctgaaaaatctttttcaattgcagtcaaaagatcctttttatctttactacttaaaataggatcgctcaagacactaatgatttgtggattggcttcagcagccttttttaattccaccatttcattataaacagtgtctaatgcatcattgtcttgcgcataaccaaatagtgcggcaccgtagcgtgctgcaatttcttctctacttaaagccattaatcatccaaccccttaataaattggtcgactaaatctttttggtctttagcagataaattcttagcaattactttttcagcgattgctacagaaatatcagcaacttgatcgcgtgcagaattcaaagcgtctgcttttgcctgagcggcatcttcattagcctttttgcgaattgctgcagcatcttcgtttgcatttgctacgatttctttacttgtgttttgcgcgttactcttagcgtcagagagaatttgtgttgcttcttgtcttgagttcttcaaggcagcttcacgctcattagcaagcgtttcagctttctttcgttcactagcagctgaatccaagtcatcaataactttttgccgccgcttttccatcatatctgatactggtccccaagcaaagtgcttaataagaagcatcaagatggcaaaacagatcaaataccagatagcattacctaagtaaatatgtgaggctgcaaataatgtttgaatagtcatttactgcccttctctctttaatactattcctttaaacagaaaattatctctttttattaaaggaacaaaatcaagaaggcaacaacgatagccaaaataggaacggcttcgatcaaaccaacaccaataaacattgttgctctcaagttacctgcactttcaggttgacgagccataccttcaagagtctttgaaataactttaccgttacccaatgatgcagccaaagctgctaaaccagctgcaatggatgcagcaagatatttaaaagcttctgacataaatttatacctccaaaaatttattctgtagtaaccttcttaccaatgtaaaccattgataaagttacaaaaacatatgcctggatagagccaatgaagacagagaaaccttgccaaatcatggctaatggagctgccaaaactaacgtaaatggtccaccagcatgtgctagatcattaccaattaaagttagcaaaacttcaccagcataaatattcccatatagacgtaatgataaggttaaaaagttggtaaactcttcaattaaattaattggaagcataaaaccaactggttgcgtatagctcttcaaatatccgccaacaccaaatcgttgtacgccgaatgtgaacgatagaagcaaggtcatcattgcaaacgacattgtcgctactggatcagcagttggtgatttaataaacatccaatcatcaactttgacttccatgaacatccctaattggttcataaaccaaataaacaggaataaaacaaatgcatataatgacaggtgattttgagcatccttgtcgctaacgttatctttaacaatgccgttagtgaaatcaagtaaatactcgaacacattttgtctcttattgggtttcatttcaacttttcttgaaagccaaatgcagataaataaaactgctaaaaccattagcgttgaaccgataataccagaaagttcaaaattcaagcccatgaatttaaaaacaaatgatttctccattacttcgtgacctcccttctcgtgctgaataaaactcgaacacgtaaatcatcttaacaccaaaaaaggtctttgtgtaaaatgaaagcgcattagagaaaatatttttctaaaaaggacgattacttagtaccaaatagtctgtcaccagcatcacccaaacctgggaaaatataaccattatccatcaatttgtcatcttcagcagctgcataaatgtcaacgtcaggatttgcttcttgaactgccttaataccttctggagcagctaccaaaacagcaagcttaatttccttaacaccacgcttcttcaatgcagcaatggcatcattagctgagccaccagttgcaagcattggatcaacgactaaacattcacgttcagcaatatcctttggagccttgaagaaatattcatgtggcttcaaagtcttttcgtcacggtacatcccgataacggcaatcttagctgaaggaaccatttcaaggacaccattaagcatccccataccggcacgtaaaattggcacaattgtcaacttcttaccagcaatttccttttggacagtcttacccattggtgtttcaatttcaacatcttcaagtggcaaatctctagtgatttcataggtcattaacccaccaatttcaccaacaatgcgacggaattcatttgaccccgtatccttgcgacgaataatagtcaacttgtgttgaatcaatgggtgatccaaaactacgaactttcccatatatgcctcctataaaaaataatatgatcattaaatattttaatcaaaaacgcaaagggtttaaagccctttgcgttttattttttatttattgaaatgatgtccacctgcagctttattcaatcgattcatgtaagctaaactttcttcaccttcatgaaatccttgtacataaatagtttcgatatcatcttgatcatcgaaatagcgcaagccaccaaataagttatggtcggcatcaactaaattgttgcccagatcaaatttatttgcttgaggtaaattaattttagctaagactggcgctaaagctgctacaccaattttttcattaaaatcaatttttgcaaaatcagcaggatcatcaaccacgactaccggctcacttggagcataatgacggtatttcattcctggtgccttaggtatatctttgtctgacactttgcccgtgttaattaaaactttttcacctaaaacttcgcttaactcttctggagtaatttcaccaggacgaagaacgattggtgtttctaccgataagtcgataattgtcgattctaatcccacacgagtagggccatcatcaataattccggcaatcttcccttttaaatcatggtaaacgtgctctgcagtagtaggactaggcttagttgaggtattagccgatggtcctacaattggataacccaatttagcaattaaatcatgagtcaattgatcatcaggacaacgaaatgctacagtatcaagtcccccagtaactgcatctggcagagttcctggtttaacaaacaatagcaatgtcaaaggacctggccagaaatgtttaattaatttcttagctctttctggaacttctttagcatacttagccatcatttcttcgtcagaaacagtaacgatcaatgggttatcacttggacgtcccttagcagcataaacgcccttcacagacttttctttggttgcaattgcacctagaccatagactgtctcagttggaaaagcaaccaattcacccttagctaacaacttaactgcatcattgatttgatcttttttaaaaatcttcgtttccatcattcttatttttgccaccttccatgaaccatgcgtggcttgccggccatatcttttctaaattcgatttcaaaatcaggcaattctttagcaaacaattccttcagttgttcttcttcgctaaaaccaaattctaagaaaaattctccatggctattcaaatgctcacgcacttgcttagcaaattttttatagaagtctagaccatctttgccagcaaaaagagcttctttaggttcattttgcaagacattttcatccattacattcttttcgcttgtcttaatatacggcggattagagatgatcttatcaaattcttctaagcccaacagcacgttggctttacgagtagttacatcaagatcataagttaaaaagttttcctcacttgttcttaaggcagtatccgttacatcactagcatataaagttaaatctgtaatgccttttttctgtgcttctttagctaaagccacggtaatacagccagaaccggtacccaagtcaaggacttgatcacctgatttaagtgtctgcaatgcccattcaaccaattcttcagtttcaaaacgaggaatcaagacaccgcgttgcaccataattttatagcccaaaaaccaagcataacccaaaatatactgtggagatatgcccttagccaatttttcgatatctttattggcctgcttaatctggtcagcagttaagtccatttcttgcttcagttcaaattcacttggtgtcaagcctaagcgctctgctagaacataatcaacatcctcaggacgcgcattttcagcactctcacccgctttaatacgcatctgctttaaagtcattttaggcattttgatcagccaactcctctaattgcttagtttggttgtaaagaattaatgcatcaataatttcatcaagttcaccgttcatcacacgatcaagcttgttaatggttaagccgatgcggtgatctgttacacgattttgtggatagttatatgttctaattctttcggaacgatcaccagtaccaactgcattctttctcttagcatcgtactgagcttgattttgactttcataatagtcataaacacgtgatttcaaaatttgcattgccttttcacggttctgttgttgactacgttgatcctgcattgcaactacaatcccggttggcaagtgagtcattctaacggcactagaggtcttgttaatgtgctgaccaccggcaccacttgaacggtaaacatcaacacgaatatccttaggatcaatatcaatgtctacttgctcatattcaggcataacagcaacagtggcagttgaagtatgaacacgtccttgagattcagttactggaatccgttgaacacggtgtgcaccattttcatactttaatttcgaataaaccttgtcaccagtaatcatgattgccacacgtttatagccgccaacctcagtaggttctgaatcaatcattgaaaccttccagttttgacgttcagcatatttttcatacattctaagcaaatcgccagcaaacaaagaagcttcgtcaccaccggcagcaccacggatttccatgataatatctttatcatcgttaggatccttaggcaacatcaaaatcttgatttgatcttcaagctcgggaatttctttctcaatttcagaattttcttccttagccatttcaattaaatcaggatcagtttcactggagataatttctttattatcttcaatctcttttttgtcctctttgtacttcttatatttttgtactacttcacgcaaatcggcttcttccttagaaatctccatgtagcgcttagtatcattaataacttcaggatcagccatcatttcctgaagttcttcatagtgagctactagaccctctaattgagccataactttatccataaactaaaaatcctctctatctttcaacacctgggtgaaagtaatgatagcgacaaacaggataataactttcatcgccaccaatttgtacttgttcaccctcataaacaggcttgccattgttaattcttaaattcattgttgccttgtgtccacaataatgacaaatggtcttcatctcttctattttatcagcaaaaatcaataaattttcactaccttcaaatagatgattttgaaaatcgttttttaagccaaaggtcattactggaatattgaacacatccacaattttagcgcattctaagacatgatgtctcttcaaaaattgtgcctcatcaattaacacacaagctagtttaccatcaccatcagcaacatctgctttgttcatctttttaatataatcaaatagattcatatcagcagtaattggaattgcttctcggtgaagtccaattctagaagcaatcgttcctacaccgctacgattatccaagccactggtcattagggcaatcttgcgcccctgtgcttcataattgtgagctactttcaagatctcaattgttttgccactgctcattgcaccataacgaaaaaataattgcgccatgctggccctcccttttaacaaaaagtcttcgccttaatagtatagaggaaaaaataaatttgtgtaggtattaaacctcgttttcatcctcgctctatgctaaacttagacatagttttaaagtgagggatgtacatgagttttaaatcaggaattgctaaagttgccggtaaatcaagctattggtttttgcataatgcccttaagggcggcaccagttttccaggcaaattagcaatgaaaattgatccagaagttttaaattctttagccaaaggctatgaaactgttattgtcacgggaactaatggtaagacaatgactactgctttgattgttgaagctttaaagaaaaagtatggtgatgtgttaactaatccatctggttccaacatgcaacaaggaatcgtgaccgcttttttggctcacaagcacaagagagttaaaagaaaaatcgctgttctagaagttgatgaagcaaatgttaaaatggtgaccaaattacttcatcctagcgtctttgtattaaccaacattttccgtgatcagatggaccgttatggtgaaatctataccacttatgacaagatcgttaatggtattaaattagcacctgacgctacaattatcgctaacggagatgcaagcattttttcatcagttgaattgcctaataagaaaattttttatggctttaaacttcctgatgacaaacctgaaaacgacttcaaggctccagtcaataccgatggtgttctttgtccaaaatgcgaccacattttacattatcatgaacgtatttatgccaacttaggtgacttcttctgtcctaactgtggctaccaccgtcctgatttaacttttacagttaacaagattattgatcaaacacctaatagctcaacgttccaaatgggcaacaagcaatattccattaatattggtggtacttataacatttataatgccttagccgcctattctgttgcacgccactttggattaactgaagctgaagttgctcaagcttttgcagaaaataaacggatctttggtcgtcaagaattaattcactatggcgataaggatatcgatttaattctagttaaaaacccagttggtttggatgaagtcttgcacatgcttaatacagaaaaagatgattattcactagttgccttgcttaatgccaaccacgctgatggaattgatacttcttggatttgggatgctgattttgaaggattagacaaagaaaagattaaaaagatcctcgtcggtggtcaacgctggcatgatatgggctttagacttgaaattgctggctttgatccaggacaaatgagtactaatccagatgatgatagcctaattgaagaaattaaaaaactgccaactaagaaggtctatattctttcaacttatactgcaatgcttgcacttagaaagaagatggccgaaaagaaaatcattaaggctggtatgtaaatagaaaggattcccgcgggaatccttttttgtgtacaaaaaaggctgtagctctaatgctacagcctttctaattattgggatattggggctcgaacccaaacatccaggaaccagaatcctgtgccttaccaatttggctatatcccagtaaatcacccgtacgagaattgaactcataactccaccttgagagggtagcgtcttaaccatttgaccaacgggcgaatcaacatttataattatgcttttttcttctatgcttgtcaagtaattttaactataataatgctaatggatggtgaaacatgatcgactttaataaaacacagcatttaattgaatcaatggtttttgaacgcgttgttccaggcgtcaattacacttttatcaaaaataagcaaatttttacatcaactactggttttgctagtatctacccagaagttactcagctgagcccttttgcagaatacgacctagctagtttgactaaggttttagcaacagaaaatgtcttgcttaagctttatgaccaaggcaaacttaactttaccgagcccttgcagcaattcgttcctgaatttaaagacccgcgtgtacgcctttatcacttgctaacccatactagtggcattcgtggctggatcccccaccgcgacaaactagatcatgatgccttactacaagcaattatcaatctgccagtaactgacgaatttgaacacaagatgcggtatgccgatacaaactttatcttacttggattagttattaaaaagatttttggtaaacctgtccaagaagtagtcacagagcaagtcctcaatcaaatgccgcttgaaaatactactttttcaccacaaaaagatgattgcgtgcctactgccctagttgatggccatgtcttgcaaggtattccacatgatcctaaagctagacaacttggaatagattgcggttctgctggcttattttccaatcttcaagacttagttaccttcgcccaaggttatttaggactaaaggatattttaccttatagtcaaaagactgtcagccagctatttgataataaaaatccccaaggcataaaaccacgctcttggggatgggaccttcggtttgatccaaagcaaaattatccgatcattttgcacacgggttttactggtactttaattattcttgatcgcatcaaacgctctggtctaattttattgaccaatcgagttcatccgactggacacaacactgttttcttagctatgcgcgaaaaaattatccgtagttttatcaacgaaaacgccaaaatataatttatagaaaaaagacggctgtgtgtcagtcgtctttttatctctcactaaatttcatcatccgtctagtattataacttattttaacgctaatgtactagtcaaatattatttttctgctttaaacattttccagtagctaattaaaatgattaatgccattaataaagtaaaataaaaggccgcctgactaccttgagctgtcgctagtgcgtaggacgttgcaccttttttctgccagatcgacataattgctgctaagatagttgttcctacagaaccggctaattgctggctagtctgacaaactgcggttgcaccggcgcgcaatgctcctttttccacctttaaagcttcagctagcgtgttagaaaatgacattctgtgtcctaacatcatgatgccataaataataatgatcatcatcacagtcaaatttaagcccaaaatagcaaataacaagcagctgatcgccattaagaagccacctaaataaagtggcaatttagctccttttttatcatataggctaccaaaatatggattgagtagccctgcaataatactacctgatagtaaaatcaaaccaccaactaaagatgtttgctttccgacaatttggatgtagttaggcaatacaaaactgataccaatattattaaattgcaataaaaagtaagctaacgcaccataaacaaacgctttttgcttaaatacggctagatctaacaatttcttggatgattttttagataatctaacaaataaccaaattaaaattgcagtcacaattaataaaatccacattaaaggattagcaaatccattactaatttgatttacgcctaatgtcaaagtaataaatgctatagctaaaacgataaatgatagccaatcaaaactatttttagtttgttcatgatacttaccgactacaaatagcccggcaacaaaaacaatgatcgcaaaaattgtaacaaaaccaaaaatccagcgccagttaagataaaaagtagtgataccgccaaatgctggtcccaaagtcggtgccatagctactactaagccggcgattcccatgtaaacgccccatttttcgcgaggcataacttcggttactaagttaaacatcaacggtgtacttaatcctgcacctagagctgaaatcagccgacctaacaataaaataggaaaattaggtgctacagcactaattacgcttccaatcataaaaccaacgcaagcaacaataaacaattgccgcgcagtaaaacgttcattcaaatatgaagaacaaatcataataatcgcaatcgccaataaatatcctgttgtcgtccattgaattatatccaaaccgacaccaaattgcttcatcatcgtaggaaaagtgacgtttaaactagtttccgtcaaaattccgacaaatgacataaacgcagctgataatactgctaaaacatttttagtattctctttcacacaaaaatcctttccacaaaaaaagaaagagcaaaaaacctttgtttcctattctttctttaattagcacagctaattatattaatacgcatactatcaaatatgctgagtatatctaatattaaagacgcttagctaaatcgtcgtgtaagttttcgtaacctggcttgttaagtaaaccaaacatgttacgcttgtaagcttcaacacctggttggttgaatgggttaataccgttcaagtaacctgaaatagcaattgctaattcgaagaagtaaatcatgtaacctaaagtatgtgcactttggtctggaatgttaacagtcataactggaacaccaccatcggtgtgagccaaaacaacaccttcataagcacgatcgtttacgtagttcaagctcttaccttccaagaagttaagttggtcaaggttcttttcatcgcctgggatcttaacatcatgacgtggattttcaacacggataacagtttcaaataaattacgtaaaccttcttggatgtattgaccaagtgagtgaaggtcagtagtgaagttagcgcttgatgggtaaatacctttttgatccttaccttctgattcacccattaattgcttgcaccattcaccgaacattcttaaacttggttcatagttttcaacaatttcagtagtgtaacccttacggtaaaggatgttacgaagtgctgcgtattggtatggagttgcctttgacaaatcagtatcagtgtagtcagcacgtgcgtctgcagcacccttcatcaattcgtcaatgtcagcacctgaagcagcgattggaagtaaaccaacagctgaaagaacactgtaacgaccaccaacatcatcaggaactacaaattcttcgtaaccttctgcatcagcttcagtctttaaagcacccttttgacggtcagtagttgcgtaaattctcttagcagcttcttccttaccatacttcttgattaacttgtccttgaagattctgaaggctactgatggttcagtagtagtacctgacttagaaattacgttaacactgaagtccttgtcgcctaaccattcaatcaagtcataaaggtatgagcctgaaagtgagttaccacagaagacaacagttggcataccgttcttttccttgccatagaaattgctgttcaagaattcaattgcagcttgggcaccaaggtaagaaccaccgataccaatacaaatcaaaacttctgaatctgattgaatcttcttggctgccttcttaatgcgggcaaattcatccttgtcatagtcaactggcaaattaagccaaccacggaaatcgttacctgcaccagttccatcgcgaagttcagtgttagcagcgttaaccatagcttgcatttcgcttaattcattttcatgaacaaattgtgttagtttactactatcaaatttaattaaactcataaatctgcttcctaactaaataaaatatttttcacaaacctattttaacaatcttgatttataaataccagtacattataagcgcattcaggcttttttgacaattttaaaaatcacataaccccaaattgctccacaagtattgaagaaaacatcatcaatatcgctaacccccgtcaccagcaaaaactgcagagtctcaattcccactgaaaacagcatccccatcagtaccgtccttaaaaacgttgctctttttgaaaaaacaatggggaaaaaaatgccaaacggcacaaagcacaagacattgccaaaagaattataaaagaaatccaaatgactgggagcatagactaatttccaagtttccttcatgaataccaagttaatatcactcaatggcctagagaaattaaaatcaagctgccacggaaagtaggtatttctaaaagttgtcagcatcaaaactaagattatgtaaaaagaaaagacccaaacgctagcttcagacctaattgatcttctgcggcgcaccaaaagaagccaaattaagcgcaatacagcaaaaattaaaaaataaaatattgttttatccagcgctaataaggttaatttaactaatgcaaagtggttaatattagttgcatactgtttagctaaaaaactataaagtgggccccaaaatagcatactttgcctctttccaaaatattcattatagattatacctattttcacggctggaaaatcttaaaaaaaagataactcttagcaaattattgttttaaaagaggtgaaccattaaaattaaaagatgttaaaggagcattatatggaaaaaaagaaaattatcagttttattcaaacacgaacgggctttttaacccttttagttgtttgtttctgtctgaaatatatttttgcagcttattttgatttcaatttaggcttgagcgacccgtatcaacatttcattatgtggctcagccccgtagggtccgccatcattttaatcagcttcggtttttatattcctaaaccgctgatctcttacatcacaatgttaattttagactttgccaatacggcattgctttttgcaaatattatctactatcgtcaattttcggactttttaacaattaaaacgatgtctaacgttggtaaagtttcgcagggtctaggtaaaagtaccgttgcccttctgcatccaacagatattattatctggattgatttgatcgttattgttactttactgatcattcataaaatcaaaattgatcaaagatcttacggcttatccaccccatttgctattacctcagtaggcgcatttgtcctaactcttaacatttttttggcagaaacctctcgtccgcgcttattgcgcaacacttttgatcgctcctatgtcgttaaataccttggtattgacacctttactgcttatgattgcttcaagagtgcgcaaaatgttcaagtcactaaaaatgccaacgctgcggacttgaaccagattttaacttttaccaaaaaacaaaatgctgctccatcttcctcatattttggtattgagaaaaaccgtaatgtgattatcatccacttagaaagtttccagcaatttttaattaatcttaaggttaatggcaaagaagtgacgccgttcctaaattcactttatcaaaataaacatacgctcagttttaacaacttctaccaccaagttggtctaggtagaaccagtgacgcggaaaacatgctagaaactagtacttacggtattcccgacggatctttattcacttctttaggttcggaaaacacctttcaagctgcaccgcaaattttgcgtcaagatggctatacttccgctgtctttcacggcaacgtcggtagtttttggaatcgaaatgatgtttataaaaatatgggctataattatttctttgataaaaattactatagctcccaaagtaaagatgcaagcggctatgggttaaaagataagctgctttttgccgaaagcgttaaatatttagagcagatgcagcagcctttctatgctaagttcattacggtaaccaaccacattccgtttaacttagataaagaagacaaggaccctaactttaagactacaaacactgccgaccaaactatcaacaattactttgaaactgcccactacctagatgaggcattgcgtgaatttttccactacttaaagtcttctggtctttacaaaaactcaatggtagtcatttatggtgatcactatgggttaagtaattctgaaaatgaaaccttagcaccaattattggtgaaagctctgacacgtggaatacttacaataatgttcaaatgcagcgtgttccattcatgatccatgccaataatttgaaaggaaaaattaatcatgaaattgctggtgaaattgatgtcttgccaacactgatgcatttgctcggtattaacaataaaaactatgtccaattcggtagcgacatgctttcgcctaaaagacaaaattggatcgtctttcgtaatgggaccattgtcagctccagatatatcatagttggtgctaaaggaatcaaaggtaacgtttatgaccgagttagcggtaaacaaatcattaattttactcctcaagagaaaaaagaaatctctgagctagcacaaaaggccaaggcatcattacactattctgacttattaaacaaccacaatttgttacgcttctacaccccaactggctttgtccctgctgatccaacccaatttgattattccgtcaattatcaaaaaatgatcgctatcagaaatgaattagctggcaattccacctcgctttatagcagacatcgcggtacaactactaatctttaccgtactgatgccgctgaactaaaggatagaaaacaagaaattacccaagttcctgacagcgttaaaaatattaaagagaataagaaaaacaaaaacagttcagaaaataccaataactaaaaagaacgcacagacctttcaagaaaaactgtgcgttctttttttagtttttagctacaaactgttcatagcccttgtcataaaaggtcacggtgaatgtggaacctttacctggtgcggaaaatgcttctactttgccaccatgttgcttaatcaaagaagaaacaatcgcaagtcccaagcctgattcgccagttcccattcgagcacgcgatggatcagccttgaaaaagcgttcaaaaatatacttagtctgattcttgctcatgccaataccattatccttaaccgataattgtgttccatgctctatccgtttacccgaaataataattttgccatcatgagtgaattgaatcgcattttgaactaagttaaccattacctgggtaaaacggtcacgatctgcataaataggcaactgatcaggtgcctctacaaccagctcatcgttggctttagttgcattttgttttaattgcgacttcaaatcatgcagaataattgtggcattaaagttagtcttaaccagcataatttgattatttcgaatcttttcatagtccaaattttcattgactaaccgaattaatcgtttagtttcgcgctgcattaacgcgattgacttcggtttagaatcctctgggatagcatcgtattgcaagccctctagaatgccattaattgttgtcaatggcgtccgcatttcatgagcagcatcagccatgaattggtctcgtcgctcttcttgagccttaacctcttcgttcgactgcttcaaagcctgcaccattttattgaaattctcagccaattgatcaatttcatcgctatctttatgctcaatttgcacattaaagttacctgatgcaactttttgcgtagcacgtgataatcgcttaattcgtttagttgaataataagaaataataaagctcagcaacaatccaaccgctacagtaattaacaatgcacgcaacaaattgcgtttagccattaaaatcggtcgctcaacatgctttactctcgatcctatccaaacaatgccaacaagatttttgccattcatccatggaaccaaaacccccgtgtaggcatccttagttgaactaatcggtgaattttcattatgattattttgaattctaatctcttgcccattttttaaagtagtaaaaacttcttgcgaaagctgaattctagcctttgttttgggataaatctgctcatttttatcattaaaaatacgtaaatgagcatcatcaccacgaagaacatattctaattgattcaagaagttattgctaagcaatgcagtcccattttggctatcagcttccgccaagtttcccaaagaattagcatagctttccatccgctggtagttttgcgtataagcttgattacgcgcataaccaatctctgagtaaccaataatcgagatagttgtcacaataatgagtaagaaactcaacacattttggtaaattaatttcattatttgacctgcgaatcatcaaacttgtaaccgacgccccaaacagtttggatcaccttggcaccaaccttctctaatttctgtcgaagctttttaatatgagcatcaacagttctttcttcaccataatactcatagccccaaactagttctagtaattggtcacgagaaaagacttgtttaggcttttgtgccattgtatacagcaaatcaaattcttttggtgtcaaacccattactggctgattatcaaataaaacttctcgtctattttttgaaatcttcaaatgatcggtcgtaatctcatagtcttgattatcttcttgagtatgagctggttcttcttccatcatcacgcggcgatgcaaagccttaatgcgggcaatcaaagcaattgggctaaatggcttagtgacatactcatcagctccgatacctagccccaacacttgatctgattcactgccacgagcagtaagcataataattggcactgtcggcaaaattgcccgtacctctttagctacttgaatcccatctttttttggcaaattcaaatctaacgtaatcagatcatacttatccgcgttctttttaaacatatcgacggcttcgacaccatcaacagcaatgtcttgttgccaaccttcttttttgaaaaacattcccatcatttcagctacggaagtgtcatcttcgaccattaatattctcaaactcattatcaatccctaaatccttttgttctcttatgcttcacttgatcaggatcgacatagtcatgtggcaattcatgtcgtttagacaaaaatgttttcaaacttttttcggtataaacaattggcaataagataaataaataaaatgttaacagccaaatgagaaaatagcgatcccaattcaaatagtgaatgattactcctaacagtgcttgaataaacccaaacaggatacaataccagcttgcccgtttctgagcaaatttaaaactatcctggttaacttgcgcaagataagataaatagccataaattcggttgggccttttggctggcgtaatcagccaaatcaaccctaccgccaccataactaagccacaagcgacatagatcacgatttctcactcctaattctgataaatttaaacggttattcctcacctggtgcagacataactattctcattttaccagtgaaagtgaaattcttcatctcatttggaataattaaattagttcccatcttcaaatcatatgacttgccatcagcttctaattttccttcgcctttgataacggaaactaacaggtatggatgatcctttaagccggtcttccaagtaccatcaaggtcaatttgccacaaataaaagtgtggtgaaagtggtggttcaaccaatgtcttaatttctgcatcttgatcttggctagtcttaacatctaacttaggatcaacatggggaacagtggtcacatcaattgacttttgagtatgaagctcacgctttttaccatccttgcccacacgatcgtagtcatacaagcggtaagttacatcacttgactgttgagtttcaattactaagcatcccttagttaaagcatgaattgtacctgctggcacatagaagaaatcgcctgctttaaccggaacttttctgagcaacttatcccattcgcctttgtggatcatatcagctaattcttcacggctttttgcatgatgaccataaataatataagcacctggatcagcttgcattacataccaagactcagtcttaccagaatcattttctactttgcgagcataatcatcatccgggtgtacttgaactgataaattatcattagcatctaagaattttaccaataatggaaattccttggcctcagggttgccaaacaattccggatgcttcaagtaaacatcccgcaatgacattcccttaagtggctcatctgttacagttgacgcgtcatccttgtaacctgaaataatccaagcttctccaacttttccttctggaatatcatagtgaaaaatatcatctaatttacgtccaccccaaatttttggtctaaagtatggggttaaaaataatggttccatttaaatcacctcaattaaagtataaactttaaggtagaataaatgaaacccttttcttagatatatgtatactatttgttttacatgtaaagctacttgttatacttacgaatacctgtagctaatctttgcatcccatccttgaccatcgtcaaaggacaagctagattaattcgaataaagtcatggccatttccacgataaacactaccagctgaaataatcagcccagtttcttggcgaatgaactctgctaattcctgtgaatcagtactgatcttttgcacatcgatccacatcaaatatgtcgcattgcccgaaatgatttgtacttcaggaatgtttttttcaataaaattctgcacatacgcaaaattttgctttaactgttttttcaaagcattaagccaatcatggccttgctcataagccgcaatcgttgctggaatcgccaataaattaggctcggctacttcatcactatttaaaccgcggttaaccatattgcgcaaattttcattaggaacaattgccgtagcagcatgaagagcagcaacattaaaggttttacttggagacactagtgaaatcacactattttgtgcttcacctgttacagaaaaggctggcgtgtaatctggaccttgtctaactagatcaccatgaatctcatccgatagtaatgttacatggtatttgtaacaaagatccgcaattttttgtacttcttcactagtccaaacttttcctactggattatgtgggttacaaaaaatcatcaaagtcgttagcggctcagctaatttttgttccaagtcagcccagttgatcgaataacttttaccatcgaaagctaaatcactcgacaaaacatggcgcccattattcaaaatggaattataaaaaatattataaactggctcttgtactaaaacattatcaccaatatgtgaaatacggcgtacaattgatgaaatagcagggactactccagtagtaaaaatcatccaatttgtttgtggccgatgattatgttctgtttcataccaatcagcgacagcattaaaataatctgcttgtgggaactcataaccaaatgcacctaatgtcaatttttgttgcattgcctcgataatttcaggtgccgtcttaaagtccatatcggcaatccacattggtaattcatcagacttcacatcccactttactgaatcagtctttgacctatctggtgcattttcaaaatcatattgcatatatctcactaatcctttggtgtttggttcgtatcagaatgaacaatttttgtacctattttcggacaatcaagctcggttttagatggatctaccttatctggatcgataatcaaagtaccaatctcaggtaccgtaattttaccagaaattgggtttttaatactatccatctttgtattaagctccacatctaaattagaaacatattcaaaagctaaatctgtatgaatcaaggaaccattcttaatctcaagctgatcaatgtagttcaagccctgatcactttcaattttacaattaattaacgtaatgttgttagtattccaagctaaatattcaccatcaataattgaatcgtaaatcgtgacattatcgcaattccaaaaagcatctttagagataaaagttgaattatgaacttcaatgttttctgcaccatcaaaaacataattttccacaacggaaacgtgatcaagataaatattctggctatctttaccaaaataatcaccattaatttgagaattggtaatcttaatatcattacaagtccacattgtttcttctgcgttagcaaaatgaacattatctaaaataatatgacttgtccttctgaataatttaggtgcctgtaaagcactatttttaattgaaatattcttggtataccaaattccagaccgtgacatactttcaaacgtagtattttcaactttcacattttcatcataccaaagtggatatttccatttaaaaattgaattctttaatctgatatttttagcttcttttaagggagattcaccactgccaaatgtaataccatcaaggattgcatcagttaatccataaagaattctttcacctgcaaaatatttattcttatattcaatcattatgcttcaccttttcgctgattatctaaagtaagttttaagttagtatttattatatgatttccttcctataatgtttaatacttatttttatggataatgcataacataaatttataatgcgaatcgagatttcggttaaacttcggtcaaacggatatcttaacaaatagagtagagggagttttataactcgcccctctcattgcaccggacgtacggttccgtatccggcgctacgtttgtgattatttacgagataaataatattctagcggatcgaccaagcctgggcgatccgctttgcttatgcccaatacttttgggctaagcagaaagttaatgacatgacccgtacttcttttataccaacctaagcgcgtattagctactttatgaatatcttcatcactaaaattgcactttagtgccttgttaatccgcattaagttaatgtatattcgttttggtagtttccattgtttaatgattaccacccgtactttatgacgcagccattgactgaacttaattagaaaatatttcatgtcgccaactctaaagtaattgacccagcctctaactacttgatttatcttagtaaagactagtgatagaggctgagcagctgcttttctgcgacagagaagttctctcatcttgtcataaagcttgattttgcggtcatctcctggctttgcttgccagtattcgccacttttccagaaggtaaagccaagaaagttgctcttggttggtcgtacaactttggttttggttgcgttgacctttaggaatagctttctttctagccatgatgaaattgaattcatcacacgtttggctgatttaccgcttttgacaaagatattgcagtcatcggcatagcggacaaagcgcaggcctctttgttccaattctttatccattttatctaaatagatattggatagaattggtgaaagagggccgccttgtggtacacctagtttattaggcttaacccaaccatcttccattactccagctttaagaaaggctcgaattaaatggagggtggttttgtcatttacttgctctctaattattgaaattaatttatcatgatttaccgtgtcaaagtatttctcaatatccaggtcaacaacccattgatagccttcgtttaaatattccaagacttgttcaatagcgtcatgagcactgcgtccaggtctaaagccatagctatgctcactaaaatgaggatcatagatcttcattaatacttgggcaatagcctgctggattactcggtcaacaaccgtgggtattcctaaaggacgtttcttaccattagctttaggaatgtagactctgcgaacagcttgcggacgatacttcatcttcatgatggcgtcctttatttctacttgatgctttttaaaatagctatcaagctcatcaactgttctcctgtctacaccaggcgctcccttattgattttgactctcctgattgcttccttgagattattttgacttaaaatctgttcaattagttccatctcgtgatatctccatttctacttgtaaatttattcagaattgtcccaattgctttcaccatcaaagagttacgttctctttgtgctaggctatcctcttatccggactgtctgaacattgcttatagcgagatatgctcttacaaacattaggcccttcgctccagtttcattacaaaaccttcagcactactacgacctcagctgacttctcgcgattaacctttttcgaccaggcttacgatcgctgatattaaagcttactcggtttcacctgtccacgagatctctcggggtaagacattcatctttaattttccactgccccctggtttaccgtcttggttttacggttgtcctttggactttaacttgtgctgcagtctcatccaccatttggcctgaccaggtttctgtacgtaggctcggaaaactcgctagccacttccttcacccatagcgtcaccgctaacggcttgtggttcgctacacttggcgacaactacccgtgatctagactttcactagactaaacaaatgccatgcccgacacacaacaaaaaaccgctctagaacaacatctagaacggttatctatggagatgaggggaattgaacccctgtccaaacgcatctcgtcactgacctctacgatcatagttatattacttgaacttcactagctcaaaacgccatataacagggctagaatgggctagctaacctgttaagactctttttaactattcaggtgaggtagttaaacgtaactcgctaaagttgatactcggtgtcagccacgagtaaaccgacaaggagcaacacatgcgcttaaattaagcagctaatgcgtaagaatttttgttatttgcagttatatttaactgtaacgtttttacgtagtcgtaacctacgaaccgcagtcaatgcgggtctacgcctgtcgaatcccaaaacatccccttgagatacttattcattatagcatagacacacattacatgcgataaaaatgcttaatcaatattagtcaaacgtaccacatcacgttcaatcatcaattcttcattagttgggataaccattcctgcaactttggaatctgtttttgtgattagtccttcactaacactttcattagcttcattatctacaacaacacccatatatgcgaaagcgtcaagaaccgcttttctcacaccagtatcatgttcaccaataccagcagtaaagataattgcatcaacgccgcccatttcggcaatataagcaccaacgtagcgaataatacgattaatgaaaatttttcttgctaacttagcccgttcgctatcactttcacgcacatcgcgcatatctggtgaaattcctgacaagcccaacaaaccagacttattattcatgatataaatcatttcatccatcgacttatgctctaccttcattagatgttgcacgagtgaaggatcgatatcaccggttctagtagccattgtaattccggcaattggactaaagcccattgaggtatcgtaagacttgccatccttaactgcagtaattgatgcgcctgatcccaagtgacagatgactaactttaagtcttttaaatctttacctagtaatttagcagcacgcggtgctgtatagcgaattgaagtaccatgagcaccatatttacgtacaccatatttttcataatattcataaggaagtgaatacaaataatgtactggatcaagattacggtgataagtagtatcaaaaaccgcaacttctggcacatttggtaaaacattcataaaagcttcaattccgcgagcctcagcaggattgtgaagcggagcataatctgacaattcgtagatcttaggcagattttccttagtaataatagtagaatccttaaagtactccccaccattaacaacacgatgtcctacaccgacaatttcagttagttcttcaacaacatggtatccttttaaaaacttgatcaataagctaactgcagcttcttgatctgggatttcagttttttcaacgtgcttagtaccatcagctaacttaatctcaaatgatgaatcttcaagacctacacgatcagccattcctttggcaagaaccttttcatctggtaatgagaataatttgtacttaaaagatgaactaccagagttaattgccaaaacttttttcataaaaattaattcctcttctttcaaaaaaataagtgctttatcaattaatgattaatctttgcataccactcgttaagtttaacattaaattgaattaaagcctcttcttttttcaaggaaccaagtttggtaagcaaaacttcacttgctttggcctcatcaccgtgattttggaaaactaaaactgacttttgattaaacttgttcttaaacatatcatctggcaactctacaatcgccttcaaatagactttcttagttaaccatggcataaaatcagcgccaatcttgcctgacaaaatagacttaggaactaccaaaaaggcatagccgttaggctttaaattattaataatttgttcgattaacaacaaatgagcaaaagaatgacctttcttagcctgattttcaaaattcttggcattctcatcaactggataatagcctacaggtaaatcacttacaattgcatcagcgttaggacacatccaaggcattaaagcgtcttgatgatataactcaatgtcaatattattcagatgcgcagccacatctgtcaaacttaacatatcttcatcgttatcaatccctaccaattgataattatccttagaatgattgagtgccttaagttgagaaataattgaaaacaacaaattccctgtacccacggcaggatcaacgatttccatcttttgatcttttaataatttatgcatcaacattgctactactgtagcaattgcaggtggagtaggcatttggttaacatcaaagccatcatcattaactgcctttaaagttagaaaagtaaagacttgagccttttctttttggctaatttcgtcataatctattgcttgatacttttgacttaattcagccactgttttttcatccggtgcaccattttcaaccttaatcttgccactttctaagttatcaaaagtctctactaaggcttctgtaaatgaaacatttaatgccgtttgcaaagtttgcacacagtctaaaaactgattaaaaagtttttcaaaattttccatagcggtccctccataccttaattattttatagaaagggataaagaggtgcaaggaaagtcaatcatccgttaagcattcgataattaggcgattgttctccatgctagcatgataaatatcttgatacattttgataaacaaaagcgtggtcattaaaactaatacactacttagtaaggcactgccttttacgttatgcgtctttttctttggttttagcatttttcttttcctgttcctcatcaagctgaaaaactaaatctgatacacccttatttttctctgttaccctaataatgatgctatctttagtggttttaaaagcagccttttcaacgttaaataataacggcatatagcctttccctgcaccagatactttaagtacgttctttttatagtattcaattcggtaagtagttgcatcgcctttttgatctatgcacttaaaggaagcactattacttatagctaatttagttactggatacactgccttaattttgtcagcccgcataaaattttctagctgtacataagcataggctacttcattgacatgctgattttgattcaagtttgcttttttaacactcaacaataaattttgtaaaattagcagcaccatcatagtaataagaagcgaaaacattgcttcagctaacataaaacctttactctttgaccgcaaaagtttgtttagtcgttgcatcccaaacatgattatgtcctgccttttgataaattcgatcgtgaactgttacttgctccaggtcagttttagtcagtatatggtaagcataagcacgatctgtttttaattccatctcacgaccatttttctgattttcagctacagttatataaaagcaactaacagcaatcacagcaattataattgctataaagctctcaattactagaaatcctttaacttttatcattccgctactctcccccacagcatttgatatttcaggcttttttccattccgtagccactaaaagtcaccgtacctggtttagaataaccagttaggttgaatttaaaatgatccaagccagtaattttgatattttgatcaactggaatacttttgtgatattttccgccagagaataaaatttgattggatctagctagatatgatacgccaatagtaacctccttgatcgtactgtacctcgaagtttgatcaagtgccgtcgtaactcttttaacagtattatcaaaaatcagtttttcttgatatctttttaactgcaaactaccaatcaacaaaatgccacagcaaacaccaagtgtaattattacttctagtagggaaaagccggctaatttatttcttttcaacaacttcgccactgtctaacgtgaaattctttttagctttagtaatttgatcaccagttaagtaatcgtccttttttagatcttcaaaatctttaggttcaccatatttatccttatataactcaacttgcgtttgcacagtagtcctaaatgcatccgcagttttagtttcagcattcttcttttgattaatcaaattaggcacaattagcaaaatcaaaatcacgataatggcaattaccacaaccatttcaatcaaagtaaaaccctcttgcttgcggcgcttagccataatgtttgctaaatacttcttcatcttctctttcatttttaacttaatcctcttcttcactctatttttttacttttatctttaatgtcactttttctatagtccttgcatcattgaatacattggtaataacagcttcaaatacattccaataatgcataagccaattaaaataaaacaagctggttgaacattgacgactaatttctcaattttttcagttaaatccaaaaataggctacgtcctaataacaaacagcgcttactcaagctctttcgctcagagccagtctgcaataaaactaataaactattaggcaaaaaatcctctgcattaataatttcttctaaattttttccttcagctaaatcgtgccctatcttttgtcccagtgcttgctgcaatgaacctttctcttgatctgccgcatattcgcacattcgctgcaatgaaaagccactagctagcagcagtccaatgtcataaaccaacaaataatgaatatacagcataactacctgcccaattaacggatatttactcagttttttcattgatgaataatcctgtttattgagcaaagtaacgatcttagcaaaaaaatataagcccagcaatacaataatgatcagaccaatcatgaccatatctcctgaatgatcactgctatcgctgaattgtgtcgaaataaacgattgcataaagaccagtaaaatcaccatcattatcgctaaaaccaacggataagataattcagcccgcagttttttcatctgctcctgttttagtcgattcaacgttgctaaatgctgcaaacattcaactaggtttccttgctgtaaagccaaattaacctgagttactgtcgttttagaaaagcctagtttaagcagttcagtactaaaacttgctccttctttcatgcgactagccattctttccatcaactgacacctttttggccacaatgccggcattaattcaattgaattgagcaaagaaaaaccattatctaaactatgttttaaataatccaaaaaggccaattgttcttcgccatttaacttatcctttttggaattgccaatatacttcatgattaatttctcctcctttccacaaacgctctagattttcctgccaattaacgaattcaccacgaaccgatttgcctagctctttttttagcaaagaatctgctgcaatatccatcaagcactttaattttccttgactgactaataatcgctgatacgacactgcagttagacaatttgtcagttcgtcacacctaatacctaatccctctagtcgagaaatagtttgcaaagtacttttagcatgaactgtcgcaaaaaccaggtgtccacttaaagctgcatcaactgctaaacgtgctgttccttgatcacgaatttctccaataattaaaatatctggacgatgccgtaatgccgcctttaacaggttttggtaatcaattcccgcttcgttattgacttgtgcttgcaaaaaagaagactcatgaatttcaacaggatcctcgattgtcatcactactttgttttggctcattttcttagcaatttcatacattgtcgttgtcttgcccgagccagttggaccactagtaataatcaatccgcgactcttagccagcttttcaattgttcccagctgctctggaataaaatattgactatggtcaatcccatagatgactcgaataaccagtgactcttgatcggaaaaatctcctaagctagataaacgcaagaaatattcatgtccttcattctcatatgtcattgcgccaacctgcgggcgacgatgttctgcaatatccatctgagcactgtacttaaaaaaattgataatttcctttcccgtctccaaagtaaaacctgcatattcaattagacccttaccggtccgaaatttaaccatcaagttttcttttttcgggaaaaagaaaatatcacttgctttaactttaattgcctcaatcaataattcactgacaatttctttgatcttcataaaaatcctccttttttgcctcacattatttattacgcaaaaaaaatcgatttttttgtgagaaatttaaaaaaacacaaaaaattttctcaactctaaaaaacgttgatctaacagcatttcaaaattaaaaaaccattaaaaaagtacacaaaaaaaaatagcttagccattggctaagctatttcatcattaactaattaatcttcatcagccgctgcagtataaacattttgaacatcgtcactatcttcaagagcatcaactaaatgttcaaattgttccttcttatctgctggaactggagtggtgttttgtggaatcatagttaattcagcatctgctagtttgtaaccatccttaattaaggcgtcacgtacacctgcaaattgctttggatcagtgtagatttcgtatgcatcatcactagtttgaagatcgtcaccaccagcatccataacatcaagtaatacttgatcttcatcagcatcagtagttgaacgatcaattacaatgtagcctttacggtcaaacatgtaagcaactgaaccagtagcaccaagtgaaccaccgttacgagtgaaagcaacacgaacgtccgaagctgtacggttcttgttatcagtcaaagcttcaacaaagactgcaacaccacctggagcataaccttcgtaagtaatttcgtcgtagtgttcttctgaaccaccttcggccttcttgatggcacgcttgatgttatccttaggcatgttgtttgaacgtgccttatcaattaccatacgtaatgtaggattcccatcaggatcaggaccaccactctttgcagccatataaatttcacgagataacttttggaaaattttacctctctttgcgtcttgcgcattcttgcggccttgaatattgtgccattttgaatgtcctgacataaggatccttctttcttttttctaatattaattaacgttattatcttaactcacagtactttaaaattcaatggtgtcaaccatttaaacttgttttttctggtcaaaaaatctgtgtttaataaacaatactagcattatcagcaaaattgccgttaaagcccctgctccatcaagcattacatcgtgcacgctcggtgttctatcacctgttaaaaattgatgatattcatcaaacgcagcaaatgcaattgccataaaccaagttaaaactggtgctacccatttgattttgaaaattcttcttaatcctaaatagccaaaaccacctagtaaaaagtaagaaccaaagtgagccattttgcgtaaaacaaattgagtcagccctgctcgaccatcaacttgcacattatgaatacgaccgccgtaagtaaaattccagccagcaacgatattctctaaccagccaaaataacggttaattttattgtcatgaatttcctgctgctgataagtcattgaactagaaatgaacaatgcaactagcaccaataaagcaagcagtaaaaagattttttctcgtttagtaaaatgaaatttatccattgctatttcttctctcttttttacttcttactttaacaaaaaaacgggttaaacttgacccgttttataaattatttaactttgcttaatgcttcatcaattggtgtgtccccatcatgcataataattacttgatgaatcgtattatcatactttaggctatcaaccaatacctgagcaacatcatcaatcgaattttctccaccttctggagtaaatgatgtcttacccgttgctggcttctccattaagttacctggttgaatgatcgtataatccaaattagtattatgaattaaccattcatcggaaaagtacttagcaatatcataatcaataatgcttgcaagagaaggaatttctgcccacttgtcttggtcaagcgcaaaggcggagcttagttgaacgtaacgcttaacgccattagcttcagcagccttcatcagcttaactgcgccatttaagtcagtttgcaataagtcctttccacgagaacctgctacaaaaatcactgcatctgggtgacctaattcttcggtcagcttattaagcgaatcatgaaaatccaaatgttgcacccgcatattaggagaaataatttcaacagtattttctcttcttgcacctgcaattacttcatagccttcatctatcaatcttttgattacttctttgctcactctgcctgtagcaccagctacaaaaactttcattgtttttcctttctaccagctagccttcttaacacctggaagttgacccttatgagctaattcacgcatacattctcggcataagccaaacttccgataaactgaatgcggtcggccgcaacgttcacagcgcgtgtattgtctagttgaaaattttgtttcttttttgttacgaataatttgtgatgtttttgccataaatacctcttatctgcgtctatttattctttgaggcgctggctttcttttgctagttaatagtcccaacgccaaaataataattccaattgccaatacttgtccagtcattaacatccccacctttctttttgactcttactttttgttggtgtattatacatgcttacctataataagtaaagagatttgattgtaaatagaaagcgttttacactagtctgatacattccctgtcaagtagacagtagaattacataaagcttttattcctcagttgattaataatcagctgaggattttttggcttctcttattttcttttcgtgtattttttgccagtatttctcaattcgatgatttggtgcaatagggcaattcttaatattgcctttcatcgcttctttgcgcatttcaccagcagttaaaccgttaaaacgtttctgtggatcttcattaatgtagtaatctattgtcttacaaatagaatcattaagttcatcataactggccacttgaggatgaagaataactcgcatttctttgataatgccttgccagccttccattggaccattatcaatacagcagccaacacgagacattgattgcgtcatgccttggtcttctaattggttttggaaaggtgcgcgagtaaattgaaaaccacgatcactatggaaaagcggatgagcattagggtatgctttaacagcctgcttataggctgcttgaactaaagcagtatcgtttcgtttactaattgcgtagccaacaggatagcgatcatatagatcaaacacagtacatagatatgccttaggcaggttagcagcaacgacttcagtgatatctgtacaccatttttcattaggtctagatgcattaaagtctctttttaacttgttttcggccgttttctcaggcgttgtatgcttgaactttagcttctggtatctaggcttttgtgatctaatgccattgatacacatcaagcggtaaacagttttatgataaaccggcttttcatcagacatctgtcgattaactgccatggtcatcttttccgtcccaaacagactgttgttagacttagttatttcaatgatctttgcttcaatctttttgtctcgttcttcacgcttactcggcttgcgcttaggatcaaagtatttgtaataagctgagcgtgctattttagcccatttgcacattaaatcaatcttccaattgtacttttgatggcagtcatggattaactgatatgtttcttgtttccagcgtctttttattgcggcttgtctgtatcttggttgtccggcaagcacatcctttctaactgatctaatttttttaggaattcgttcttagtttgttcttctttgagctgacgctctaattccttaatttttcgattagccagttctaactcagttagctcttctggcttcttatgtctgcctcgtttatctgttaatcctgtttcaccattagctagatatttgtgtgtccagctgtaaacctgctggtaagaacaatcaaatttgacagctgtttgagtgtaattcttgtcgtgattaagacagtattgaacaatctgaattctttcttgctgggtagtttttcttcttgctttagtcatatagacctccggatggggatcatagtcccgattttctatatgactattatacttggaaacccattctgatactgttccattgcttctaatgccatatttattagctaaagaaggtaacgacattttgccagctaaatattcttgaacaaccttttctttaaatgccttagagtaatgattattgtattgagcattacttagaagggtatcacgattgctttgatattgatgaacccatcttcttacttgcatcgctccacttttacttggcatcttaagccgtttagctatttcaacgctgctcctattaccattcaagtattgttcaactgcccatatcttttgatcgaatgaatatttactttttctggacataaaaaatcccacctccatggataattgaatactttatgtatttaaatcgtccactttagtgggattgtatcagtcacagttctttttaataggtaaaatttatttgaatactttcatctaagaaaggaatagaatgaacgaaaaatgtaaaaataagtcgccaggattcttatctttttagggagtaattatttttaaatagagaaggatgagaattaattggacgatttaacatcaacaaataaaatgaaagccatcacttggcctgttttgaccttgatggcactttgtactgttatcggcttggacgatatcatgtacaacttccaaaaccaagggatgccagttatcacctcttggattatcatgtgtttgctttatgtaacaccttactcattaatggtaggacaattaggttctacgtttagtgaagaaggtggcggactttcatcatgggtccgcggtactgacggagaatttttaggttacttcactgcttggacatactgggcagcctcaattccttatgctgtagactccgctaacgaaatcattgtcgacctaggttgggcattgaccggttcaaagggattccaagataaaattcctactaccatgtttgctgctttgactttcgttgtgttcattgttttcattatcgttgaacaccactttgccaactcaatggaattcctttccagtattggtggtggtttgatggtcattatgactgtcttgtttgttttccttgcctttgttggtttggcaaaatcaggcggtcacatggctacccaaccatttacttggcacacaatcattcctaaattcgacttgcactactggtcaaccgtcggaatgttaatctatgccatgaatgggtgtgaactggttgcaccatatgtaactaagatgaagaaacctaagtcagacttccctaaggcaatgattactttagctatcatgactgctttcttaactatccttggttcatttgcacttggtatctactttgacgcataccacattccaaacgacttgaagatgaacggtgcttactacgtattcgacatggttggtaaacaattcggtatgggtaaattcttgctttacctctgggcttggacatcattattgttcaactgtgccttggttgccgtattgcttgatgccatgactagaatgcttatctccgacactggcgataagtacatgcctaagttcttacgtaagaaggacaaaaacggcttaccaattaacggttacatcttaactgttgccctttcatcattcatcatgatcttaggtatcttcttacctgacatgaacgatatcttcaactggttgcttaacttgaactcaatcatttcaccaggtgttacctgctggatcttctactcattcatgagagtaagaaagaactcaaagaagtacccatcaaaatatgtctacattaaaaacgataaacttgcttggcttgttggtcttgccttgttagttgttactgccgtagcaaccatccttggttttgcaccacaagatgttaagcaaggcagtggcctttggtggtacgaattgatcattaatattgtagccgtaattgtcttaattggtttgggtgcaattttacctggaattagacgtcgtgaagaagaatacggtattgcttttgacaaatctcaatggatttggatgggaattatcattatcggttctattattcttgacgtatggcttggtagtaccaagattccagcaagaatcacaatgattatagttgaagctatcgctgcattaatcattacttggattgttggacgaagaaaaccccaacaagcaaccatataaaaactaaattacaaaaaagctcgcaaataatgtcattaattatggcatgctttacgagcttcttttttgctcaaattgatatcactttcactctatattctataatcatatagtaatttacaattattttgtaattttatatactcaacaaggttagcactaagtgttatactaaagtataatggagataaggcatatatttatagaattatttaaactgagactgaataaaatgaaaaatataagaaagaagattatagtatttctgctagccttggaatgcttagctttttgtatatcctttaatagcaaagtgtatgcatcatggagtcccgcttcagaatggaaagaaaatggctatcctactgaggactggacaacagatcaatttacataccatcaaataggatttattaatgatcctaaaaataatcaattgttgttatatgtagacatttgccctgattctaaaaccaatagaaatagtcatggatatgaaggtggatatcgtcaattgcagccatcagcctacaatataaatgttggtaatgctacatacagtgttaatttagatgtcaatccatggaatattcaaaatggaaaatctggatatgcaggaattggagtatgggatcctcaaactaatcaatataaagcaactaaagataatctctgtcattattatgcagatagtgatggccgccaatcggccataattaagattccttacaatatgtttaacagagatgacctaaacggatcaactaaaatgacaatgcaaaatcctaatttgggtggcaacacaaaaatcacaatcagcggagccagcaccggcccatacatccctgccatcatcgcttttgtcttagcttcaatagccgcaattagttattaccataaaagaaagttagtacgtcatgaacatcagtaaaatatccccaaaaatatttcattttggaaatggtgtcatccgtgcctttttctttggcttgattataattagcttcttcgctgtgctctcatctactaattggctgccagatgcaaaaactacgaccggcttaacttacataatgtttgcactactattaattttagttttaagctggttctcctttccaaagtttcaaatgttcttaaaaacaatttttatcaagcataaatggattacttctattatttgtttagtccttgcattaatttggcaaattcaatttgtctacttcgtacatcccgcaatcggatttgatgttagtgctgttcacaataccataatcaatccgaatctacctgaattaagaggatatttcagtgttaactacaacaacctatccatcctccttactctaagacaagttgccaatatctttcattcaaccagttggttaacaatggctttatgttcaacacttgttacagatttaagtgttttagtaatcatcgctacaattgcgataatcaattttcaaaaaattcccaatatcatttatattctagctagtctgcttagcatattccctatttgcatggttccttacacagatgtatggtgcttgctccctatttcactttcaatttttggctggagcatcgctacccaaaaatcatatctagttgtcattcgttttttaggagcaattttatccggaattagcttagcatgtggcgttgggatcaagccttcagttgctgtttggggtattgccgcgattttaacgagtttactctatattttaaaaaacaacaaagtaattctaacttctattttctgtttaactattgcagcaagttttgttttagcctatcaacctcttaaaaaagcggttcaagatcagcattacatcatcgttaatcaaaaacgccaaattccgatgatccacttcatcaacgttggtttaacacatgatggtgcctatgatccaaaagcagctttaaaaatggatgagcttcctactaagaaacaaaaagttgtctattctaaaaagatgatcatcaagcgtcttaaaaaacgcggtccattgggttatttacaatttctagttaaaaagcaaggtctaaatactgcagatggtacattcggctggctgcatgaaggccattttattatttccaagcagccatcagaaggctggcgaggattcttagcggaatttatctatccaaatggaaaatatgttattgagtttagatttatcgctcaaattctttggacaattattatttttgtattgctattcagttttcaaaaaggcggctttattattcaaacgctaagaatggcactagttggcggttttatattcttacttctttttgaaggcggacgtagtcgttatctagttcaattcttacctattatcttgattttaacagcactttcagcagacactgctaaatataatttagataaaattttgacagcaattctaccgaaaagaggtttttaaatatgaatcttagtttaatttaccctactatctctttaccaatcattacaattagcatggttgtaactcaaacacaaatagaaaaagtatgggagaaacagctagaagactggcgtcaccatttatttatcatattgtgttttactactttttacatactccaaactgtttgtattgcaaatgtaaccatctttacctttaaagcaattgcttatatgtatgtcattccaacaattatggtattacgcaacaagcaacatatttggtggtttttgctttttatcacaccactaattccgttacttattggtcttgatttaaagagatattcatttataaatatccccgctactttattgcagatttcatccatcgcattaatctgctttattctaaatcattgtcaaaatctttcatatcaagttaagtatatcattgccctttattcagggagtctcatccattttgtacgtctttatatagaaaatgaattacacctcacatttttaatcgctttgacaatcggaactactttcaccatcattggtgaaagctggcgttattattttgaaagtcgacatgaagaagcaattgctaaattgcattacgaaagcaagcgtgatgaattaactggtcttcttaactttcgcgcttttgaccaagaaatgaaaaatttatctaaaagacctaatataactaatacctatattggcgctattgatatcgatcattttaaagtaatcaatgatacctatggtcacttaaatggtaatattgttctgcatactttttctaaaaaactgaaacacgagattgataaagcttttgctcctaattgtttcgtttaccgctttggcggtgacgaattttcaattgtcatttttaatgctaatcctgaacaaatcatcgctgcactaaacaatgttgaacaatatttccgcgataattttatcaaacttcctgataataaaactaaaataaagttctcgttttcatgtggcttcacgaagcatttatctaatgaacatttttataacactcttgaacgcgcagatgatttagtttacaaagtaaaaaataatggccgcggaaaaatattgactgattaaaaaactaaggaaatgaataatgcttaatggatatttaattggcgggattatagtttggttatatgccctttcagtaactaatcgtgcacatttatttgctttttattattgggttggtgctattggtgcttttcttttaactacttttgcatgccacaaatattttgtctggttcctagctagcctagtgagccgcggagctggtgtgattggacagctgactcatagctttactgcttatccgtttccagctgctttagacattcaaactacttttggatcaattaccctattagttgactatgaatgttctggaattattgaaacattggcatatttaagcttattaattttctttcctatttacactcgtcgtcaaaaggttgctcttagcattatcggtgttttttggatctactttattaatatttgccgattaggtttaattgggataaccgttcattaccttaatttgcgaaccctgttctgggttcacgacgttataggacgtatctttttctatatctttacaattcttctatattatcaagtcttcactcattcacaattagtctcaaacttactagggcgaagcaaattagattaaaaaggaataatcatgtttgatcaaacagtattacaaatgggattctgggctacttggcttttaattcctgtcatatttgaagaaattccgatgataattaattttattcggcttcttcatcatcataaaattcgcaaaaaaacccctctgccagattttttgccagtattatcaattattattccgacttataattcatccaaaacactttatagatgccttaaatcgctagctgattcagattatcccaaaaatttactaggaattttcgttgtcgataatggcagcaaagatgacacctttcaagtctttgctaaagctcaaacggactatccacaattattgatgcggtggcttacttctcctcatggaaagtcttctgcattaaatgctgccatttataaagcaagatcccaatatatcattaatatcgatagtgacggtcggttggataaacatgctttaaacaacattgttaaaaaattctcggctaatccaaatatcgatgctttaactggaacaattttaaatgaatattttgaatattgccaaacctttctagcaggaagaaatattgaaaataacagcaatcatattttcacgctttctggtgccttttcggcttttaaacgcgagaccttaattagaacgtatctttacagtaccgatacaattagtgaagatactgacatgactttccaaatccggtacaatttaaagggaacgatttcattttgtgatgatgcaattttttattctgaaccaattagcggcttcagtgaactatatactcagcgacaacgctggcaacgcggtgaactagaagtcattaacaaatatttatcgcaagttttatcttggaaacaattcttcagtaattttcaaattcgtcgtttaatcattgatcacacagtcactttcctaaaaataatttggatgtttgctatttttatattattaggatttggctattcatggatatcattattgttttcttatgcggtaatttatcttttatatttatttttggagatttcgagttcaatttgtgtttacatatacttaggaagctttccagaagaaagaaaattttatcttaaaaatatttggatgatttttttactgcttttttataatttactttgttctttcattcgttgtgttgggattattaatgcttcaaccaccactacaacttggcaaggaattaatataattcaagaaggtcaacaggttaaccaaatcataaaaaaagatataagacaattattgaaaagaaaaaattatgacgactaaatatcatacttatatattcacaacttatttgaacgcatcacatgctattcgttggagtaaaggaatcgggcaggctcattcccatacttatgaaataaggtatagctttcatattaataacggcaaattgattcgtttcaatgaaattgaaaataagattgctgaaattataaaaaagtttaataatcaatttttaaatgaagttgagccattcaccaaagtaaatcctactttagaaaatttaaccgattatctattccccggatttaaaattgaagtgcaacactaagtgttaaacaaaaaggccatgaagacctaaacttgaagtgacgaaaaatcaagaaaggaagatctttatgaccaattcaaattctagcatttctaagcactatcatcaattaaccagcgtacaacgtggacaaattcaagcaatgctggattccggcataacttcccgtactgttatcgctcaagaagttggctgccataagtcgacaatcagtcgcgaaatcaaacgcggaagcgtcctgcaaagagacagcagctatttattgtatgagcactattacgctgatactgcacagatttattatgagaagcgtcgcaaaaactgctatcagcgcaatccattgaagcattatgctgtctttttgagaatgctctccagacgctttaaagctaaatttgatgccaccagcatcgatgagttcgttggtgaattcaaaaggactatgccaggctacccttgtcccagcacaccaactgtctatcgctatattgatcagggcttgctggacataagcaatattgatctgcctatgaagctcaaaagacgcaggaacaagcgtcatcacagccatggcggtcacgctttgcacaagaagcatcttggcaattccattgaacagcgtcctaaagagattgaagacagaaaagctccgctgcactgggaaggagatctggttaaaggcgtcagacgcaagaatcagcctgctttaatgactttgactgaaagaaccacacgctttgaagtagttatcaagattcctgactatcgggcaagcacatgccaaaggctgcttcaaaaggagattgacagacatcctgcctggtttaaatcaatcacgtttgacaatggctctgagtttgcggatatgaccaagatcaagggctgccagatttactttgctcacccatattctccatgggaaaggggcaccaatgaaaactgcaatggtcttttgcgtcaattcttccctaagggcaagagcatgaaagacaagtcaaaagcttatgttcaacaggcaactgatgccattaaccacaaatatcgccgaatcctccaatatcacacagcagaagaactcttcaagcaatatatttcctcatagcctaactgttgcacttaatttgacaattcaggcgattatctattcaatcgtttcggcgaagaattaaataaattgaattgtagtttagatgaaatatctgtaagtgaatcaccaatgagaacttatcagatttcaattaggtaacagaggtaatagtaatgagtaagtggtataacgtttttcaacctatttatcaagtcgataaagatttaaatgtaacaatttcacattatgaaatgttattacgagatgaaaatgattccttcccaaataacgatttcttcagagtaattggaactgaagaagaaaatcaaaaatggattttagccgaaaaagagtcaatagatcaagcttttgctaagtaccctgatatctgtatcaatttaaacattgagcctattcaattcgcatacccaagcgtttggaaatttattgaaaatatttatagtaagtatggtaaaaaagtggtcattgaagtaactgaacgtcaacttcaagctggaaccttaggtaataaacaatttgataaatctttccaaagattccatgatattggcttggacgttgttttagacgatgttgattctggtggtcatagctttacttttgtagatcaccattctgatataatcagtgggatcaaattatcattactagacttcgatcctattagttctgatactactattaaatttattgatgcttgggctagctttgctaaggaaaaacacttagatctagttgtagaagctatcagaaataaggaaattgctcaaaaatttgctggtaataaacatattttccagcaaggttattactggcaacagggagtaaaactagaagacttaccaacggtttatggatttaagaagtaattacaaaaagacagaattgattgcttaattctgtctttttttacatgtatttatttaaaaatttgtttattcgcattttatattcatgcggataagtttcgaatgaacgcgcatgagctgcacttttggcaatccataactccttaggaccatttgtagcatgatagttttgatacaccattttagttggcacaaaattatcttttccaccatggataaatagcattggcttagtattcttttttaattgcttaactgcagatgcatcccctaaataaaagccaagatttgctttacttacaccgcttaatagcgtaactgcacttgtagctactgcttgcggcataccgtataaatcttttgcttcatgcatgaattcagctttcacatcactatacccacagtcttcaatatatgccttaacttgcttaggcatcttgaggccactagtcatcattgttgttgctccgcccatactgacgccaaaaattacaatctgttgttttcttccttcaattgataaatctttattgacccattttctaacgtcatatttttcaggccaaccatagccaatatacttcccttgactttgtccatgagcacgcgcatcaggaatcaaaacattatatcccaattgatgaaacatcgccgcatagggtgccatggtatttttattattaccaaatccatgcagcaacacagcagtcttttcagaatgcttatttggaatataatttgcatctaagcggtagtttgaagaagcagacttaatataccaatgctcttttttagcgtttttataccactttttattctgcgcaagtgaatctttctttttcttgctagaatatttattcagcactgtcttttcacctggaacaaaagcaacattaaagaaatatgcttcaactgctccaattaaaacgattaaaactgtggcgactatccctattatccaccatacttttttgcgttttctattcaaaatgtcaactcctatataaaataatatagaattaattatacacttttgaattttatatggtatattgacattttaagtaaaatattgcctatacaaaaaatgatggcttacgccatcattttttgttattaatctaaatcttcaccgtgagattcaattaccttcttgtaccagtaaaatgaatccttaggcattctcttaagagtacctttaccttcatcatcacgatcaacatagataaaaccgtaacgcttagacatttgaccggtaccagctgatacttcatcaatacagccccaagtagtgtaggcacggacatcaacgccatcttcgatcgcacgattcattgccttaatgtgcattctaaggtaatcaatgcggtaatcgtcatgaatcttaccatcatcactaatcttatcaacggcacctagaccattttcaactaccatcattgggatttcgtaacggtcatacataacttcaaggtagtattgcaagccatctggatcagttgcccaaccccattctgaatacttaaggtatggattcttagcaccagcggcgaagttaccgccaaccttatcttttacttcatgagttgtgataacgttgctcatgtagtaagaaaaggtgtacatatcaactttaccttccaacatatccttcttatcttgctcagtaatgtctaagtgaacattgtgttctttccaaagacgcttagcaaatgttggatacttacccttgcattgtgcatccccacagtagaaaatattttgttcccacatatggcggttagtcaaaatatcctttggatctggggttaatgggtaatcaacgattccacaaatcatattccctaccacataatcaggatcaatttcatgagccaacttaactgcccgagcactagctacgaattgatagtgcaatttctgatatgcatgttggtatgccttatcatcagtcacattattgccaaaagcactaagcatcaacagggttgaattgatttcgttaaaagtaagccagtacttaactaatcccttgtattcttcaaacaaagtcttagcatatttcacatacatatcgatcattttacgatcttgccagtcatgatatttttcactgaggtaaagtggatcttcatagtgagaaatagtaactaaaggttcaatatcatattttttacattcttcaaatactctgcgataaaagtcaagtccagcttgatttggcttttcctcatcacccttagggaagatccgagtccaagcaattgataaacggaaggttttgaaacccatgtccgcaaacatcttaatatcatctttgtaatggtgataaaaatcaatcgctacatggttaggataatattcattaggatcaattgcaccaactgccccttcaggaagtcccgcacctggaactcctggtgttttttctaacttaccatttaacttgtaagtcaacattctaggtgcatctaagctacctgcagtagtaatatctgttactgataggcctttaccatcttcatcatatgcaccttcgatttggttagcggcagttgctccgccccataaaaagttctttggaaatgacattatgattctccttttctgaaagcatttacattaattatagactaattggtttgaacttgaccagttgttttaacttctgcgttactgccttgcaaagacaaaatttcttgaccaactttaacttcaccttgagctacttgctgtacagattcatatttcttagaattcgtaacaacaactggagtagtcacttcatagccagcagccttaatttctttaatattaaatttaaccaatggatcacctgctttaacctcttgacctttttctactaaagtcttgaagcccttaccttgcagattaacggtatccattccaatgtgcattaacacttctgcgccatctgtagtgttaagtccgacagcgtgtcctgttgggaaaactaaagcaatcttaccatcagctggggcatgaagcacaccttcgcttggttcaatagcaacgccttcccccattgcaccgcttgagaatacttcatctttaatttctgacaatggttttacttcaccgtctaatggtgaaactaatttggttgaaggattttccttttcttcacttaaaattgcttgtacaggagcactcttagtaatattagctgcttcattagcggcgtcagcaactttttgtgcttgttttttattatattcagcatcaactgattttttaccaaagagcatttgaagtgcaaaaccagctataaatgctacaataccggcaataattacgccgacaattgttgtcattgatcctcccttaggattaatgtaggccggaattgcaaagaatcccattgatggcataatgtacaatactgaatgaaaggcaccaatgattgcacctgagactgcaccagcaatacagcttaaaacaaatggcgtttttcttggtaatgtaataccataaattgctggttcagtaacaccgaacagtcctgagaaaaatgcaccagtagctgtttctttaagttttttgtccttagtttgacggataatagctaaaacaacaccaatttgcgcataacaaaccatgcaggataaacctagaattgggtcataacctaatgcggctaaatctgcagtagttacggcaacgattccccagtgaacaccgaaaataacaagtacttgccaaagagcacccattaataaaccagcaataattggactaaagttgtaaacacctgacatcactgcaccaattgcgtccccaacccaagtcattacaggaccaattactataaatgcaactggtaaagcaataatcatagtgacaactggaaccaagaacatttgcacaactgatggaatccactttttagcccagtgctcaataattgaagcaaaccaaacggtaaataatactggtaaaactgtagaagtataattcatcgtgataaccggaatgccaaagaaagtcgtgtgaatctctgaggcaaaagccgttcctttaaacaatgtacctagaacagtcttacttgcagctaattgaaccatagttggataagttaaggttgcaccaattgctaatccgataaattgattcatgtgaaatctacgtgctgcagttacccctaagaatactggtaagaagtagaaaatactatcaccaattgcatatagaatttggtaagtacccgatttagtagaaagccatcccattgcgcctactaaaactactaggcctttaataataccgccagcactaagtggagctagaatatctgtaaaaatgcctgaaatcaaagcaacggctttatccacaaagctagaattatcttcaacgtcatcatcaggaacttgtccaccgccattaaagccgccttctttgacaacagcatcgtaaacatcagcaacttcattaccaatgaccacttgatactgaccaccagctttaacaacagttacaacaccatctgtatcttttaaaacatcatcgttagcctttttttcatcctttaatttaaaacgcaaacgagttgcacagtgaacaacactggtcacattatctttgccaccaacattttgaatgatggtcttggctaattcatcatagttcttagccatttgcctttcctccttaaaataaaaacccaagctactcaaaaactaaagaacataaatgttcaacgtctttcagtaactcgggttcatgcctaatcttcttagtaacatacctaagtaacttagatatttaattatcttgacgactagttacgcgccaaatatgtaaaacaagataaaattcatcatctgaatctaaatcccatcccatttttgcatgtaagtaagtggtgatccgctccgccgtctcatacgctttgctatatttgattttcataaaacctagcattgcaggatcaagtgaagcctcctccttttgcttatttcgtaaaaatctaactaacaaaatgcgcaaatgcgaaacaaacctactatagttaaaggagctcgtatcaagttgcattgaatattgcaattgaataatatcgattatcccacgaatcaaatttgtaatctgaattgtttcttgtacttgagaaacatcactcttagcattaaccaggtgataggtcatcaaaaccgactcactctgcggcaatttaatctgcatctcctgattaattagattgaccacttttttagctgccgcaaattcttttggaaaaagattttgaacttcccaactattgttagcgggagctatatcaatatgatctttaattcgcgtaactgcaaaatcaatgtgatctgctaaagcaagatactgaaagtcattgaacttaatctgaagcagaggttcgaccagctgaagtaccttattagttacttcaattgttttagggtcaaagcccttaacttgatccacttcgtctttagtaacgaagcgacgttcaattttgctttcatcaacaggatcacttttttttagaccaaatcctacgcccttgcctaggactatttcttcttgaccttggttattttcaattaaggcagcactattattaaatgttttaagaaatttcataataattcaccaccttagcaaaaaaagaaaaagctatcacaaataatgatataccaacgcaacattatttgtaatagctaagacctgatcgtatcagtaatccgctcacttacagttattataatagccaacattgtaagcggtgtcaatataattttgtgaaaaaatgcaaaatattttacaatgaactaaaaagcgaggtaattaaaatgaaattcgttcttgcacctgattcatttaaagaaagcatgacagcaaaagaagtctgcattgcaatgaaaaatggtattcaaaaagttattcccaatgcacaaataaccgcagtaccaatggctgatggcggcgaaggtacaactgattcattggttgacgctacaggcgggcaaaaataccaaataaatgttaccggtccgcttaatcaaaaagtatcagcttattatggcatttcaggtgatggacaaactgcaatcatcgaaatggcacaagctagtggtctctcttatgttgcaaaaagtaaacgaactcccgaaacaattttaaagactacaacttatggaaccggcgaattaattaacgcagctttgaagcaccacgttaaaaagattatcatcggcctgggcggaagcagcacaaatgatggcggtgctggtatggcacaagcacttggtgttaaattttttgatcaaaatcatcatgaaatcacccaaaagctagcaggcggtgctttagatcaaattgtcaatattgatctttcttcaattaatcctcgtattaaagatacccaatttttattagccagtgacgtaaccaatcctctaactggacctaatggtgcaagtagcgtcttcggcccacaaaaaggcgcagatgatacaactgttaaaattctagatcaaaatttatctcactatgcacaagtaattgagcagactattgataaaaacgtcgcccaaatttctggtagtggtgctgctggcggcctaggcgctggcctgatcgcctttactaacgccagtattcatccaggcgtgcaattaattgcccaagaaactaagcttgaagccaagatcaaagacgctgactatgtttttaccggcgaaggcggaactgattttcaaactaagtttggtaaaacaccctttggtgttgctaaaattgctaaaaaatatcacattcctgttatttctttagcaggctatttagatcaaggtattgatcaactctatgatgaaggatttaccgctatatttggcattcttgctaaagcagaagatattgagcaagccctaaaagatggaccaataaatgttacccgtacaactgaaaatattgttcgtttaatcgcacaaaaataagatgagctcgatgcccatcttattttatttcgttaatttcttaattaagccttcacagccacgataaatttcattatacgctgtttcaaaatcatttgtataccaaggatcatcgacatcagcataagagccagcaaactctaaaattttatgttctttatgctctgggtctccaccagtaatgcgattcatatctgcgaaattttcttcatccatgcagattaaatattcataattatcatagtctgagcgagtcatttgactagcacgatgaccacgatcatatggaatatgttttgcaactaattcccgttgtgcacgagcatcaatcccatgacctaaagcatcctgcgtagttgctttagattcagcagtatattgatctgctaggttattttcttttaacaaatattgcatcacggcctctgccattggtgagcggcaaatattgccatgacaaacaaacagaatttttttcattaccttttcttcctcttagttagtctatttataaccggccaaataatcgccgtaataactccaactgttaagccaacccaaatctcctgcgacaaagttacaagaatgccactataaactcgactttgcaatgcggtcatcgcctcatttgaggcaagccacaatgccacaaatgaagcaatagtagctagtgctagtggaattgacgccgaagagcgaccaaataaaatcaaaattgcggctaacaaaaataacaaagccactgcaaaaattgaatactcataaattgtaataatatggttcacatcttctgaatcttccttcaatttatgattaatttgcttgactaaatattcattgataatttcttccaacttacttttactagttaagcctaaatctttagtggtcaattttccctgatcattatatttttcacacaatctatatagatcagcatatgataagttaacttgatatttcggcggcaattgttctaacaatgtcttttccaaaccagatgcttcgagtaactcaacccctgccttcaaattaggattatctgagtcatccactactcgattgattacttctttgcccatcgcctgtgtatcgtttatttttaaattcacattgctagtcattaataaccaaaaagatactgcggctaggccgaccattatcaaacgtagtattattttgacgatgttcttcatctaaaaatcttcccctaacatctacttttttcagatggcaaacaattgcaaggcaccatgtcaggagcatccttttctttcaatttaagttcttgctgcatcgtcttaatatcgcccttagaaagcggtgcttcttttagcaactgaattaatacctcacccttgtgcatatcacacatgttttgcatcatatgtaaagtaacttcagacatcattttgcgctgactaatagtcggcttataaacaaaacaccggccttctttacgcgtctttagcaagcccttttgcactaaacgccgcattagcgttttaattgtggaatcggaccaatcctttttaccttgtagttctttgattacttggccagtacgaacttctcctaaggtccaaataatacgcataacttcccattctgattgggtaatggaattacgatcgtctttagtttctgccataaaacatcacttctaaatccaaattttttactaaagaacaaattttttcaaagcctttgcaatcccgttgtgatcattatcatcagtaacataatcagccttatctttgatctcactaatggcgttacccatcgctactttcatgaagttgggattagaaaacatcgaaagatcattgccttgatcaccaaaaatcatcacgtctttttgggcaatttttagccgtgaagccaaatccattaaagcattaccttttgaagctcccaaggcatttaattcaataatactgtcaaaactgcgaacaatgtcataagtctgaaaagcccagtcggggaaactattccacagtttttctacctggtcagctccttcagttgaagtaaaaccgactttgttaaaagtaaaatcttttggaatttcttttcggtctctaactttcataatattatcggtcaaagccgcattaatttgcatttgcacagataaatcccgatcagttgtaatgaaatacttagtcgtctcaaaatgtacatttacatgacttaaacgctgaaaacgcaacatattattgaagtcttgataattcaattcctgactcattaaaacacgaccagaaattgtttgaattactgcaccattaaagacgattgcatattgatcatcaccttcaattcctaattgcttagcaaagttcaatactcctgataatggtcgtccagtagctaaaacaaccttaatcccattttgtactgcgacacgcaacattctttgcgtttctggcaaaatagtattattgcttgataataaagttccatctaaatcaaccgcgatcaatttaatagccattttaatccctcggatcttaaaaattacatctagcattaattatacaaaaagccgtgatttaactcacgactttttacttatcgattattcaattaggattttacttacccatttccttttcgaccactttaacgatacggtctacataggcatcagtttcttcttgagttggtccttcagccattactctaagcaagtcttgagtacctgatggacgaacaagtacacgaccatttccagccatatccttttccactgcagcaatttcatcaagaattggttggtgttctttccagctcttcttgtcagcaaccggaacattaactaggcattgtgggtaatctttaaagtctttcaaaagttcacttaatgacttaccagtcttcttcattacgagcattaaatgcaaaccggttaacataccatcaccagtattatgataatcactcataataacgtgacctgattgttcgccacctagattgtagccgtgagcacgcatttcttcagaaacgtaacggtcaccaacttgggtacgaacattcttcaagccttctttttcaagagccttagtaaaaccaagattactcattacagtagtaacaatggtatctttcttcaaacgaccatgttctgccaagtatgagccgagtacgtacatgatgtggtcaccatcaacttcattaccattttcatcaacagcaatgcaacggtcagcatccccatcaaaggctaaaccaagttgagcaccttgcttaacaacttcttcttgtaacttttcagtatgcgttgcaccaacatgatcgttaatgttcaaaccatctgggtgagttgcaatagtagtaaagtcaacgccacaatcagcaaacagtcttgagatcaatgcgcttgaagcaccgttagctccatcaataactaccttaattccacccaagtcttctggaatagtattttcaataaattgcaagtatttagctgaaccttcgtggaagtcagttacagtacctaatcccttagcagatggacgaggtaatttatcttccttagcgtcaattaatttttcaatttcgccttccatttcatctgaaagcttcaaaccatcgctaccaaagaacttaatcccattatcttctacagggttgtgtgaagctgaaatttgcacccctgcatcggcgccttgtgctcgtactaagtatgaaagacctggagtagtaattacgccaacctcaagcacttcaatcccaactgaaagaaggcctgaaatcaaggcatattcaagcatttggcctgaaatacgagtatcacgagatactaataccttagcttgttcgccgtcttttttgttcttagttaaaacataaccaccatcacgacctaatttaaaagccatttctggagttaagccttgattagctacgccacgaacaccatcagttccgaaatattttaacatttaataaacaacctttctcaaattaattattcgcattctttactttaattgatatctgtacattttcaggatcaacgcgagcaactcccttaggtaaaactaaagggtaattctttacagttgaatatgagattcctttcagatctacatcaacatccaactgcttaatctttgctaatgtttccttttgtccatacagtgttacctcatcattcttggcagtaaccgaatagactttattatttttttcatttttaggctttaaatttagcttaactttctttttgaaaagcgatattggcaaactagcttttactgtagatggattaatcactgcatttaattgacgcccttttttatcttcagctatcaaaataacttgacgctcataatcatgattaatgccattaggtaaaggcaacttggcaacgatctgatcaatctgatttacttcgcttctagcaccagtaacctcaacttgctgcggatcaacactagccgtaccaatattatatccattagcaacagcatttttattatactctatttgaacgggcatggtacgagattttcgccgttcaatatcaacattaactgttgccgggttaatcgtgtaagataattgactatttagtcccgtaacttctacctttacggtttgcttacctattttcttatgagttagatcaatataagcacggaagctttgagtattaacagtcgaagtaaccaacgcattcgaaccctccaaagttatcttaaccttttcaggataaccaacaacatagtatttatctgtattaaccgaaacttgcagaggaacactaattgtctgcgtttcattagcagtttgccgtgtcttcttagattcaccctgtgtaacaaaacctgtttgagtagagtcaatgtaaaccactaataagatcgcaaacagcaatgagattattctgattacccagcgtttatcccaaaagtctttcatcgatctgcaccccatttccagactttattaatcacacgacgaatccatggaaccttcttctcttccttaggaacaagttgagcattcaaatacttcaaatattcttcacgagacaaatctactaaaaagcgcccgtttctagtaatagttacgccaccagtttcctctgagacgacgatcgttaccgcatcggtaacttcagaaataccaacggcagctctgtgacgcgtgcctaaacgcttaggaatcatgctgttatctgacagtggtaaatatgctgctgcaacagcaattcgattattattgataattaccgcaccatcgtgcaacggcgtattagggataaaaatattaattaataattcaccagaaatatccgcatccagcttgattccagtttcaatataatcatctagccccgtatcttgttgaatcgtgattaaggcaccaattcttcttttagacatgtattgaatcgctttatcgagctcctgcaccatcttaaccgactgtgtatgagcactctcacctcggccattaaaaatcggcgtgcgtcctagtcgctctagtccacgacgaatttccggctggaaaataacgataattccgattactgcccaagaaacaatttggtccacaatataagttaccgcatgcagttgcagtaagccggcaataattctaacaataaagataaagacgatcccttttgccagttgtactgctttggtaccacgaatcatcatgatcaaacggtaaactaaataccaaatgattaaaatatctaaagcaatggagaaattattccaagtaaacagattagaaatattaaaatgcattgattgctcctttcttctttaattataaccgccccaatttaccgtgcatacattttaaattctaaaaataggtcattatattcttgggtcttcttaggacctaaatctctaaagacctgtagattcttcaacgtactttgagtaggataaaactgccggtcatctctaacttttttcggcaataatttttgggctgcggtatttggggttgcatatccaacatattccgcattttgcgctgcatttttaggttcaagcataaaattaataaacttaagtgcagcttttttattttgtacagttttaggaataacaaaattatcaaaccacaaatttgatccttgcttaggcacaacataatgcaagtgaggattttgttccatcatttcataagcctcaccagaccaggtaacgccaattgctgcctcattttgcactaggtacatcttcatttcatctgaaataatcgccttaatattgggtcccagactattaagcttagtttgtgccaaatgtagtttaatactagatgtggtattcattgaatatcctaaagaaaccaatgccatccccattgcatccctagctgaatcaactagtaaaatttgcctgcgatactttttactccacaggtcattccaagtcttaattgcccctggcttgacgaatttatcattataaacaattcctagtgtcccccagaaatatggcacagaataatcattattttgatcaaatgacttatgtaaaaaactcttgccaatatatttcaaattaggaatttgcttttgatccaactgatcaagcaaatgagccttgcgcattttagttaccatatactcagaaggaatggtcaaatcatatgccgttccgccttgtttgattttggtatacatcgcttcattggaatcaaaggtctcatagacaacatgataacctgtctgcttttcaaacttttttattaactttggatctagatagtcgccccagttatagataatcaagttttgtttatttttcccggtagacgatttctccaaatgatgggataaaccccaaaggcctgcacaggcaattaaaatagctgcaattgccatcataatctttttcatttaactaggcctcccatcacacgatgatttttctttctgccctttttagtagtaataaaataatagattcctacaagcaacaagacaaaaatgaacattacggtacttaaagcattaatctcaagatcgattccttgtcgtgcccgagaataaatttcaactgaaagagttgaaaaaccattcccagtaacgaaaaaagttacggcaaaatcatctagtgaataggtcaacgccataaataaaccggaaaagatgcctggcataataactggaattaaaacatcactaaaaacctgccatgaattcgcccctaaatcacgtgctgcatcaataagcgacatatccatttcattaagtcgcggcaagaccatcaaaaccacaatcggaatagaaaaggcaatatgacttaacaatacagaaccaaaatttaagccaattcccaatgctgtaaaaaagatcaaaaaactagcaccaataattacatcaggtgacaccatcaagacattgtttaatgctaaggttgttttcttattagattcttttttcatcgcagcaattgcaattgcaccaaatgtcccaataattgttgctattaaactggacaacagcgctagtaggatagtttccaaaaatatcgctaataagcgattatcttgaaataaagtctgataatgagcccatgtaaagtgctcaaatttattcatgtttttaccactagaaaatgaaaagtaaatcaaataaaaaatgggtacatataataggatcaaagtaaaagcaagatagatcttagcgattaaatgtctgtttctcataaatctaccttctttcttctagcctttttgctagtaatcaacatgactaccaccatcagcgcgattaaaattactccaattgtggcccccatattccagttcattgtggtcataaaatactcttcgatagcagtccctaatgtgattacccgattgccgccgatcagccttgttaacataaataatgacaatgatgggataaagatggcctgaacgccgctttcaactcctggacgagaaagcggccataaaacatagcgaaaagtttgccatttactagcacccaaatcctcagaggcatgaatgactgcaggattaatctctttaatcgcattaaaaattggcaaaatcataaacggaatttcaatgtaagtcgccacaaaaataaaagcaaaatcagtaaacaaaatatttacgggaccaataccaaataaatgtaaaaatttatttactaaaccgtcattacctaaaatgccaataaatgcatatgctttaagcagcaaattaatccatgttggcaaaatgatcaataacagccacagctgctggtttttcattttaattaaaaaatacgctgccggatacgaaattaccaacgtcaacaaggtgatcaaaaatgcataccaaaatgagttaagcatcatttttaaaaaggtaccatttttaaaaaattcaacgtaatttctgagcgtgaatgcgttattactatcagtaaacgaataccagagaatcaataaaatcggcaaaatgacaaagagaataatccacagcagatatggaatcataaaaaacatctttttatttttcattttcatccgcctcatacttttctagtcgagcatcaaaatcgtgttggctttcatttaaccgcatgacgtgaatatcttctggatcaaaaaagagcccaacacgttgtcccaatttaactccattagtagaatggatcagccattcattttcattggcatcaattgccttaatctcaaagtgatcacctaaaaataattgcgtctgtgctgtaaccacaatcttcccatcttctggtttaacaatatccaagtcttcgggacgaataactacttcaaccttttcattaggcttcatcccaccatcggcacatttaaatttattattagcaaattccacttcgtaatcatgaatcattcgaccagataaaatattggagtcaccaataaaacgtgctacaaagtcattcactggctcatcgtaaattgctaccggattaccactttgttgaatctgcccatcatttaaaacaaaaatttcatcactcattgatagagcttcttcttgatcgtgcgtaacaaaaataaaggtaatgcctagctttttctgaattgcccgtaattcaaattgcatgtcttttcgtaaacgtttatccaaagcagatagcgactcatctaatagtaaaaccttaggttcattaacaattgcccgggcaatagctacacgctgctgctgtcctccactaagttccgaaatttcgcggttagcgtaaccgtctagacgaaccatatgcaaagcatctttaacagctggcttgatttcactcattggtcttttcttaattttcaagccaaacgccacattttgaaaaacatccaggtgtggaaacaaagcataattttgaaaaactgtattgatatgtctttttgaagcatcaaggtcagtaatatcattaccatcaaagaggacttgaccactagatggctgagtaaagccagcaataattcgcaaaattgtcgattttcccgagccactaggaccaagtagtgaataaaatttaccagattcaatagttaaatttatatcttttaatgctacaaacccatcatcatattttttggtgatgtgttttagtttgataatatccatttccatccctcacataaaaaacagctgcaagccttccagcctgtagcttgtctttgctaaaatattttacttttctttgccgataatcctaacttctgtgcgtaagtcaatgtcaaacttttctttaattaccttttggatcaaatgaattaaattcaaataatctgttgcagtagcaccgcctttattcacgataaaacctgcatgtttcattgaatcttgagcgccaccgatttgtttaccttgtaaaccagctttaataatcatcggaccaacaaagtgcccagtaggccgcttaaagacactgccacaagatggatattcaagtggctgcttataacgacgtaaagcatttaaataatgcatatgatctaagatctctaacttatcgcctgacttgagtgcaaaagtggcgcttaatacaatatcgccattttcttgaactaatgaatgccggtaagaaaagttcatttctgcgtttgaatatgttttaaattctcctgctctggttaaaacattaacgctttgcactacttcttgcatctcaccgccataggcaccagcattcataaaaataccaccgccaatactaccaggaattccagcagcaaattccattccgctcaaaccatgatgagcagccgcaaaagctgtatcgataatccgtgcaccagcatcagctgtaacttgattatcttctactttaatctcttttaattcagtcaaaataattactaacccatcaattccgccgtcacggatgattaaatttgaggcattgccaataattgttaatggaatttcattttcacgtgtgacttttactaattgttctacttcatcagtcgtcttaggaaaggccaaatattcagctggtccacctgtcttagtaaaagtatatctgcttaatgggatttgctctttaatatcaatccctttttctttcaaatcaagtaattccacgctgttgcctccttaaagtttcttgttttattttaccgcataaaggcgttagcttcattaatattaatgatatacttttttaaaaggagaattttatgaattttattgcaatggactttgaaacagccaaccattatccagaaagtgcctgttcacttgctttggtaatggtgagaaataataaaattgttgatcgcttttatacagtaattaatcctcaaatgccatttgacgcgcgaaatattcaagtacatcaaattacagctgaggacgttaaaaacgctccaacaatggcagaggtctggccccacattaaagaattgtatcaaccaggaatgcttgtagccgcacataacgctcgctttgatactaatgtcatgcggcaaagcctggcacgttacggtattgaggagccccactatttggtcattgacactttagctagcagtaaattactcgaaccagaactgcctgaccacaaattagacacagtttctgaggccttaagcgttgaattgtggcaccaccataacgcattaagtgatagtgaagcttgtgctgggattttaatcaagcaagaagagcaatttggtgatgaagcaatcaaaaatttggtttatcagatatgaaaaatctctaggaattttgatcctagagatttttgctttacttattaaattcagttaacgcagctttgacccattcttcattgcgcttaccatgaggagtaaattcaacaacccgtttagttgaatcccaactatcgtccactctggtaatcgtaagttgcaaatactcatctggcaaatcattcattactagttgtggccattcaattaccactaaacctggttctgctaaatagccctccaaatcaatcgaggataaatcatcattttccaaacgataaaagtccatatgaaagagcggcaacttagcttctcgatattcacgcacaatggtgaatgtaggactcttaacaggccgatgtatgcctaatgctcgccctaatccttgagtcatggttgtcttgcctgcacccaaatcaccatttaatagtaataaatcgtagggctgggccgttttggctagggatgcacctaatttctgcattccatcagcagaattaatttctaactttgtcattacttttcatcctttgctaaagcttgtgcggcagtaacaattgctaaatcataaatatcttgttcactgcagcctcgagataggtcattcactggagctgctaaaccttgcaaaattggaccaacagcagtgaagccacctaatctttgaaccatcttataaccgatattgcctgattgtaattctgggaaaacaaagacattcgcatgtccagctacctttgagtttggagccttcttttcactaactgcaggtacaaaagcggcatcaaattgcaattcaccatcagctggaatttctggatgatccttttggaacatagctgctgcatcatgtaccttatcaaccattggtccttcggctgaacccttagttgaaaagctcaaaaatgcgaccttaggatcaatttcggccatcttggcagtcagagcagattgatagccaatttcagctaaagtttcttcatcaggattaatgttgatggcacagtcggcaaaaatgtaacgctcatcgcccttttccattacgaaagcgccggatactcgatgcatccccttagctgcatgaattaattgtaaagctggcaaaacagtgttagccgttgagtgagcagcaccggaaaccataccgtctgcttttcccatcttcaccaacatggtaccaaagtaattaccttgggctaacttgagctttgcttcagcaatactggtatcttttcgtctagctttaacaaattccgctgccatttgatcaagttcatcataatgattgaggtcatagatcttaacaccagctaagtctaaattattttctttaactaacttagcaatctcatctggatttccaattaaaattggttcgataatgccatcttttttcaaattagctatggcagtaagaattcttaaatcatcgccttctggaaaaacaattcttttcttatcttttgctgcttcaacttgttttttgaataatgaaaatacgctcattttttacctcttatgctaaatcagatttacttatcgtttctggcaattgccagtcaatcggcgtttcatcaaagttcttcaatgccatattacaccgcgaaaacggtcgcgagccaaagaaccctcgatcagccgaaaatggacttggatgtgatgatttaatgataaaattcttactttgatcaattaatggaatcttgttttgagcaaatcgaccccacaaaataaagacgacttttccacgctcactcagagccttaattgcagtatcagtcacatcttcccaacctttgccttggtgaccgttagcatgcccatacggtaccgtcaaaaccgcattcagcaaaagcacaccttgatcggcccacttttttaagtaaccgtgattaacaggccgagctccgacatcatcatagagttccttatagatatttttaagtgatggcggcaaagttgtacctggcatgacggaaaaactcattccattagcttgaccaggattatgatatggatcttgacccaaaattaccactttagttttagcaaacggtgttaatttaaaagccgtaaaaatatgatacatatcaggataaatttgtttagtagaatattcttcttttaaaaaattatgcaattcgtgatatttctcacttgcaaaaacaggatccaatacttgatcccaatcgttgccaattaattctttagccaagtcttacaccctcttttcttctcctctttatggtatcattaatttaatactaaatgggagagaaattatgatcaaattagttgcttgtgatcttgacggcacgttgtttaattcagagatggctgtttctgctgctaatgcaaaagctgtgaaaaatgcacaaagtagcggcattgaatttttaattgcgactggccgggccccacgcgaatcacgttcagttctcaaagatgctgatttgcataccagttttatcaatcttaatggtgtcctggtttttgacgaaaatgagcaattaatgatcaaacacagtattcccaaggcaaaagcacaacagctagtgcatttactacatcgatcaggcttttactttgaaattttaactgccaatcaggtttatagtgaaaatctagatcaacgtatttcaaatgtagctcatttaatggtagatctaaatcctctacttgattttcgtcaagctgtagcaatttctgctggtaataagactattatgaatatgaaacaaatccacagtttcgataatttattgcaagatcctaaaatagaagtaatgaaaattattgcttttgactctcggggacatgaagcttttaccgatatcaaaaaagaaatcgctacaatgggcgatctagtagtaacttcaagttcatcttctaatattgaaatcaatgagcaacatgctcaaaaaggtcttgccttacttgattatgccaagttaaaaggtatcgagcctgaggaaatcgctgcaatcggtgataatttaaatgatgagagtatgatccgagcagcaggtactggcgttgcgatgggtaatgcgattccagctattaagaaaatagctcaggtagtcaccaagcgaaacaatgaagatggagtagcttatattttaaataaatttattgcagataataacaatatttaaagttatgaggtgagtaagtatgcgattttggctagaacttaatcaggaaaaggattacggtcaaattcctgtgcttaatcaaaatggaaaagctgaattttttattcaaggcaatcttgataatccaaaccacactttatatctaaataatttccgtaaacaggaagtgggacgtctgttttctgatggtgcgggcctaattgcttcgttcacaattgatgtcgtcaaccactctttagtaggcgtaaaaaagttaaacacacctactgcaaacatattctatttgacccaattaaagtatattgttacaggtagtattaaacgtggtacttatacttttcgttctggaatcaagagtgtagcaagtgtccaaacaatcatgggagatcgcggaggcgttttaatttgtgatattactaagcctgaagacgtcccctttattcttttgacatccgttctatttacacaatggcatgttacgcctttgaaactgcctagttttccgccaattggatttgaggtaaatccaaattaaacaaaaaagcagtcatgaaaattttcataactgctcttctagaaagtgatatagatatagatgtagatgtatcttctgccataaagtttatatttattaagtaataaggaattattaggcagagactgaataatgaaagttaaatctaatttgattcaacctccatagcttattatacttcgttcagccaaaaatacaagggctagatgttattattttactttaaagatagctaaataatgcctttagagctagcttatagcttaataatttgttatttaacttagtacatctatttttctaaacaagacaactttaatttctacgtaaattgcaataataaattgaacacttttaatcaagctgcttgatagattagatctaattctctttcaaagatttcatctggtgtatgatatgccaatatctttcttggtaaagagttgcaccaggtttcaatgtctatgatgtcttgtagtgaataattgtctattgcctctcccttaggaataaatctgcgaatgagtccattatgtctttcaacggttcccttgtcacaagatgtataaggatgagcatagtaaactaaagtatttgatacgtcttctaagcttgaaagatctgcaaactctgagccattatcagtggtaatggttttaaaaatatcattccaatgttcgctgtattgcctttggagttctttaaaggcctgcatgacactgacagaagtcttgtcaggaatacgaagaattaagaactcacgactcatacgttcagataaggttagcagcacctcatcatctttgctcttatgtccgagaactaaatcgcattcccaatggccaaactcattacgtttattgatttctttaggacgttcttcaatgcttctgccaagttttttcttatttctgcgaatacgatgaagcttggtattgcgtttaagcttctctggcaagtcgtaattatgtatatctaatagaccttggtcgacataattgtaaagagtcttagtacagacaacatctctgctgctaaatgcgccaacagcggtggcgcgattactgcacacatcaagcgaccagccgtctttaaagaaatgtttgtggacatagcgcatgaattgagttttcctgagaaagtctgatttacgtccacaatttttacgatgagcttgatatgcatcatgcccttgagtagccttatatcttttgactttgccatgatacagttctacagtaccgcgcttaacctcataactgatagtagaaggggaacagtttaattcacgggcaatggcacgcaaagaatagccatctttcaaacgcaattgaataataactctttcctcgaatgataaatgcttgcctttaatgtgatgattcatggtagaatgtaaagagtccattttgacctcgtttctaaatgttgtgtggtaactacattctatcaaacaggtccgaatggactttttattttttattaagtgttcaatttaattttacaatcagcgactttaatttctattaaaaaatatagtgaaatgatcaagtgatttatcaatggcttgatcatttttatttactttatcaacgaacttgtttttagctatcaaactatataaaaaagagccaaatctaatgatttgaccctaaaaattctagattattaatctaaattattttttatgaattagtcttggtagtttaccaattctaagaatgattctggtactaatgaagcaccaccaaccaagccaccgtcaatatcaggcttagccattaattccttaacgttagctggttttacagaaccaccgtattgaatacgaacgttttctgcagtttcttcgttgtacaagtccttaacagtttcacgaatagtcttgcacatttcttcagcttgatctgatgaagcagtcttaccagtaccgatagcccagattggttcgtaggcaataacaagtgaagatacttgttcagcagttaagccgtctaaagcagccttaatttgagcaactacccagtcttcttgcttgttagcttcacgagtttcaagtgattcaccacagcaaatgattggcttcaagccattagcaaagattgccttagccttcttgttaatgtcttcgtcagtttcgtggaagtaaccacgacgttctgagtgaccaataattacgtagtccatacccatttctttcaagaccttaggtgaagtttcaccagtgtaagcaccttcgtcttcaaagtaacagttttctgcaccgatatgtaagtttgagccttcagcagcttttctcaaagcgtcaaggtcaactgcaggtgcacaaataagtgattcaaccttacttgggtctggtaacttatccttaacagcgttaacgaattcagtagtttgttctggattcatatgtaacttccagttaccagcaataattggtgtacgactcattaatctattgtcctttccttactattacttgtctgaaacgcaagcgatacctggcaattccttaccttcaaggtagttaagtgaagcaccaccaccggtagaaatgtgggtaatcttaggagcaatgcctaattgcttagcagcagcagttgagtcaccaccaccgatgatagtagttgcatccttaaggtctgccaatgcacgaccaacttccaaagtaccttcagcgaagttaggcatttcgaatgcacccattgggccgttccaaacaacagtcttagcatccttcaagatttccttgaacttttcaacagtcttaggaccgatgtcaagacccatcatgttgtcaggaatatcatcaccaacaacttcacgtgaagcatcatttgagaattcagttgcggctacgttatctacaggaagaacgatcttgtcgccagccttagcaagtaattccttagcaaggtctaccttgtcagcttcaaataatgatttaccaatgctgtggccttgagctgctaagaatgtgtaagccataccaccaccgattaaaatatggtctgacttaggaattaagttttcgataacaccaatcttgtctgaaaccttagcaccaccaagaatagttacgaatgggtgtactgggttttcaacagcatcacctaagaacttgatttccttttcaagcaagtaaccagctgctgcaggcttgccagcttccttcatagcagttgcgataccaacgtttgaagcgtgacttctgtgagcagtaccaaatgcatcatttacaaacatgtcgccaagacttgcccagtattcgccaagcttaggatcgttacctgattcacgcttaccaaagtcgttgtcgatgtcttggaatctagtgttttcaagaacgataacatctccatccttcatgttgttgatagcgtcttcaacttctttaccttcgtttgatggtacaaaagttacaggcttcttaagaagttcacttaaacgttcagcaactggctttaatgataattccttcttgtcagcatctgacttaacacgacctaagtggctaagtaagatagccttgccaccgtgttcaatgatgtacttaatagttggaagtgcagcaacgatacggttgtcgtcaccaataacgccatccttaattggaacgttaaagtctacacgtactaagacctttttgcctttaacatcaagatcgtcaacgattaatttagccattataatcctccgattattttgatattttttcttcaaaaaaaggcggaaggaagaatctccctccgccttctcaattaccacttaactatataatcagttaattaaaattaatgattaaagagttgcaaagtgtaataaagtacgtaccatttggcaagtgaatgagtattcgttgtcgtaccaagcaacagtcttaactaattgcttgtcacctgcagtggttaccatagtttgagttgggtcaaagattgaaccagcagtcatgttaagaacatcgctagaaacaatgtggtcaccgttgtaagcaaatgatgggctttcgtacttcttcatagcttcgttaacttcgtcagcagtaaccttcttgctcaagattgataccaattcagtttctgaaccatctggaactggaacacgttgtgcgtgaccgttcatcttaccgttcaagttaggcaataccaagccgatagccttagctgaaccagtagtatgaggaatgatgttttcagcagcagcacgagcgtcttgttccttaccactacgtgaaggaccatccaaagtcatttgagtaccagtgtatgcgtggatagtagtcatagtagcaacttcgataccgaattccttgtccaaagcgttagccattggtgcaagtgagttagtagtacatgaagcagctgaaacaatcttgtcatcagcagtcaaagtgtcttcgtttactgagtaaacgatagtcttcaagtcgttaccagctggagctgaaatcaatacacgcttagcacctgcatcgatgtgagcttgtgacttagccttgctagtgtagaaaccagtacattcaagaacgaagtcaacaccatcgttcttaacccatggaatgttttgtgcttgtggttctgcgtatacgtggtaactcttaccgtcaactacgattgaatcttcagttgatgaaacttcgtggttgaaagtaccatgagtagtgtcgtacttaagcaagtaagcaagcattgctggagtagtcaagtcgttgatagcaacaacttcaatgtcctttgacttttcgccaaggtccataatacgacggaatgctaaacgaccgatacggccgaaaccgttaataccaattttaactgtcataacctaaagtcctccttaagaactataaacaacatttattttaaacgggatttcatttcccctttaaaatcatatttgaggcgccctcatcagtgattagccaggtttgatgaggcgcattaggcatataagctttaattgcttgagcctttcgggcaccacaagcaaaagcaaatatgtggggtattttgtataggttctcgaactgcaatccaacctgggtgatgcggtcaacaaccttgccatgttcatcgaagaaacacccgaaacattcggtgacggctctcttctcacgaagttcagatagcttaattgaattatagcctctgcgctgtgccatttcttgagctaacccaataccatgaatcacagcatcactttgagaaatgtcttgcagaacatctgcgatcgaggactcacgaatcaaagatttgtaagcatcatctgaaacctgctcaggtaaatataatgtcttataagtacctgaagtcttagcagccatttcttggacgattgtattactttgcgtctctacattttcgcccaaagctcctcgacctggaacaaattccaactggcgattgttagctaaatctggtgataaatacttagcagatctagctaacgccgctccacctagaattgtaactattgaatggcctaaaggcaagagtaaattcaaagctgaacttaatttttctcccatctcctcatatactcggtcttggaaatccgcattaccagggacgatcaatgttctttcaatccctaattttttggctaatgctacttccgtttcaccggcattaaagaggcgatcaagcaatggtcctgcatcttttaatgttttctcacccttttcagttaaaaacatcccaaaactttttgtttcaatcaatcctaattgacataagtactcagtctcagttctgatgtttctctctgaaagccctaaatgctgagcaacactccggcgtccaattggcgcatgtagcgaaatctgctcaaggacaagatacctttgtcgaagaatctttaagacgtcgggaacgagcgcttcgagcaaagaaaagtccgaatccatcgttccctcctttccatgggacatctatcgaccacctacgtgtcgttttgtgtcccagaatgcttaaaaatataagagaaacgtacttttcattcaattcatacatttcccaatcgacactgttagtataacaatgtatttttcgtaattcaagaaaaagatacacgattttaaaaaagtcgtaaatcgagtaaaatcatttttatttcattactttttttgatatactaccacttgtgaatcatctgggtccttagtgtaatggatcgcacataagattccggttcttagaatctgggttcgactcccagggggcccatataactacatgttgaagactaccgccatctcggtattcttcttttttataccaaaaaagcattcctcacggaatgcctttttcaatatcacaattatttagtgcttgtagtcatcaactcagcacgttgtgctaactcagtgtacaaagttgagcctgaaacagataaaccttcaatttcacggcgagtgttgaaatgatggctaccattataagtaccatttgctgctacacggaagatgtagtcgttaaaaccaatatagaattgattgtggttgctgtcataagcaaaaccttgaactggtgaaccagttacgaaattactttgagtagcaccgatttcttctggagcccaagtgtcaccatttctagttaacttccagtattcatattggtgacgaccaccattgtggaacaatgcatacatagtgttgtcgccaacaaaggttgcattatggaagtaacgaggatatgcactgctgccgttccaggtcttaacagtccagattttgttaatcttcatatcactctttcttacttgcataatttcttctgaagctgttgaattagcagtcttattgttattagccaaaacataaatgtagcttgaagaagagccaagtgattgaccatgacctagcttaatgtatggtgaaactttaatattgtttgcgtagcttctaaaagtgctccatcccatagtagttaagttttgagcagcatatttactcttaattgcattcaagttgtaagaaacaagatgtcctcttgagtcgctactgctagtgtacatagaagctgtaaaaataccatcattaacagtaataccttcaggaattaccccaacttgtcccattgcatcagcagcttgaccatagcctaagctgacaaaacgtggttggaacaaacgagtgcgcaaagtcatgccgttacctgaatagctatttgagctagtttctgaacgataaccgtgtgcctgattccaatttcttgatgatccctttgagccaccattccaagtatgaactgccttaggaccactcttaacagaagcacctgcactagtaattccttcatttgtatctgaacgaacagttacattaacgcttgcctttgccttaccatatgaataatctaccttagtagtgccggcacggcttgaactaacagagctatgtgaaacattaaccctatctggattaattgcagtaccttgtccatctgttgcatagttaattgcatccctagttggaaaactgtagttgctgttgtgaactaagctaacatcttgagctactgaaatttggtttctagcaaaaaagttttgacttacccaacctacattgcgtccatcgacaataatgtaccagaagttacctttcttggtagaaacatacttcttagattggatttgaccatgcttaaagtacttggtatttgaaaatgcacctgatggtccttttttagatacattatgataaatagcgtaattaccattgccagcaatcttagtaactgccttgctgtagcttttggcatctaccttgctttgactaatggcaaaaacaccaccaactaatgcagcactggccacaaaagttaataacatctttttcccttttaacatccttattaatcctcccatatgaaaaaatcacgttcattttagcacaaatttatcaaatgaaacatctaattattaaaaaatttcctgaacaacaagactttgaaaacgcttctgttatataattaaaaagttcacataaatatataaatagtaatagggagaaattttatggtcgaatcacaaaataattccaaaaagatgatgtggaccaccctagcaatgatggccttctctaccgtgtggggctttggtaacgttgttaatgggtacgtctactttgacgggacaaaggttgtctttagctggatcgtcatgttccttctctactttgttccttatgccttaatggttggtgaacttggagctaccttcaagaatgctgaaggtggggtttcctcttgggtaaatgccactatgggcgcaaaatgggcctactacgcaggttggacctactgggcttgccacgttgtttatatttccagtaaaggtactggtggtttaagagcgatggcctggggtatcttcggaaatacaaaatggtatgatggcttacctaccgcttggacacaatttgctacattagtagtcttcttgcttttctgttgggttgcaagtcgtggtattccagtattgaaaggcctagcaacaattgctggttcttcaatgtttatcatgtcaatcttattcatcattatgatgtttgccgcaccagctattaatccttctgctggtttccacagtattgactttaactggaagaatttgatgccaaccttcaacgtaaaatactttacttctctttcaatcctagtatttgccgttggtggttgtgaaaagatctccccttatgttaataaggttaaggatccttccaaaaacttccctaaggctatgatggctttagcaatcatggttatggtatctgctattttaggtacttttgccatggcattaatgtttgaccctaaggtggttaatgccaaccttaacgaatacatctctaatggtgcctacatggcatttgacaagctgggcgaatattaccatgttggcggcttgttcatgtacatctattcatggtgtaacgtaatcggtcaattctcaacattagtaatcagtattgatgcaccacttagaatgcttttgggtagtaaagaagctaaagaatttattccaaagggcttattaaaactcaacaagcatggtgcttacatcaacggtatctggatggttgttgtcctctctggtggcttaattgctattcaagctttagtaccaaatgctcaagctgttatggcacaattagttaaattaaattcaactactatgccacttcgttacctttgggtatttgcggcatatgttgctttaagaaaacagcagcaaaagttcaacactacttatcaaatgactaaacatcaaggcttagcctatactgccggtatttggtgttttgtagttactgctgcatgttgtatcttgggtatttactcaccagatccatttaccttattccttaatatcttgacgccaatcgtcttgattgcattaggtttaattttgccaggaattaagaaatatcaagaagcaaaggcaaaataaaatttaaatacagaattttaaaaaggaagcaatttcaaaagactgcttcctttttagtgtatatttttatttattagcccaagcatttaccaatgccttgtacttggcaacgctaattcctgcacctttactgcttcctaaatatgaatcagcatttccataaccagtattgcttacattggcaaagcccattactctataatttctgttaatcaaattcaaatagtgtcctgccattttatagccgttcgtgccctctacggccgcatcataagttgccgtccaagttggactatacttcgccggcttcaacgaatgattcttttttacatcataattccaacttttcttttcagagaaccaagtatcaaccggatctaaacccacactttgagtagcgatgttttccaaaccaatcgacttgaaataatgagtatgctttaagccaccacgtttttgatagtcagcatttaacattgaggctgctgtcaaaagtggtgacacctttaatgaccgaaccccttcacttctacgtgctctattgacactattcaaataaggcaatacagctttaatattcttagcactagttgcatcatcatttgaatgcaagtcaacgtattcattgtaccaacttgccttaggctttttacctaagcgacctgttttcaataatttcactgctgatctagcggaactcctttgccctttagtcaaagatttgtttttagatagatatgtcataaaatcaacggcatttttggctgccttaactggcttggaattcaatgcagttaatgacaaggtcaccatcacagcagaagcacctgcaattaaaaatcgtttcttcattctttttctcccatattaatatatgtgaactacgatttaattgtagcacatacactaatggaagattttccttttaaattgcattattattcatctttaccattccgctttttaatctgacgattaattttttgaatatctttttcttgcgtcaatctaatcacaatccaaattatgatatatacaaaaatgaagatacctaaagtttgccaatctataagccaatgattaaaaagcatcataatagaaaacaacgtaaatgtaccaattaaatgtaacaacaacgcaactaaatatgacaggttagtataaaaaagaaaactcaattccccaatcaaaccactacaaatgaaaacaacaattacgctcattaatgggatattaattgcacctacactatttgatactattcctaaaataagcaagcaagtaattgcaccaaatcccattccagttacacaaaaatctaaaactttatgccaaattttcattttataatcccagtttcttttctaatttaggtaaatatcttcttgaaacatcagtcttctgtttaaaagctagttttgcaatcatattgcccgtaaatcctgcctcgagtgcttcaagataattcaaattaataatcccatattttgatacctgtacaaagtcattatttaatttctctagaacttgatataagcgacctgtagttttaatgacagcacttttggtataaaaagttaattctgttttttcaacctcgactttgataatttcttcaattttaatagttaaaatccgatcttcagtttttaccggcagaattgaatctacctttttaccaaaatcttgaatataagccaataaattttttacttctgctgtttcctctaaagaaattactttgatcttaatttgatcttttttcaaattagaatctgactgaaattctacattcacgtgttaattcttctttctatcaagcatgactgcgagacatattactataactgtcaataagagtgacatagctattattaccaatgcattatccccgttagttaattgatgagacccaaatttaaaatgaatccctaaatactcaatcaatttttgacgcatttcatctggaacatcttcctgacttaatttatttaagagcaagcttctaaaacttgccgcttcataactacttggaaacaattttactatattttgcgcagtttttgataaagttccataaggcatgtaagttgcaaccataaatccagctgctgctccaattaccgccgacaaacgactaaacgttgttgaagaattgataaataaaacgataactaagtttaataaagttgcgccaattgcacctaataacataaaacctaatgctggcaaatatacagtcgattgaatattcaccttatcaaccactgaaaaataaattgccatcaccaaaaaggtaataacctgcatcaagaaacttattattaatgctgaagctacgtaggccatgcattcactaattggagttaaattcgttagctttatatcatcaattgctcggctttccctatccttcaccatttgaccaagtgcttgaaacgaagtagtaatgcctgcaattgaaacaataccgccaagcatccagaggtccaataattgttttgcatgactaacgttttgccaagaatcaacaagattttgttgtaaaaatccaatataaatcacaaatgaaattagtgcaccaaaacatgacattactacacctggtttattagcaaaataaattttgatatttctcttcattaaggcgaacattattgaagctcctttccagcaatcttgataaatgcatcatcaattgacccttttcgatattcaaatgtatcaatcttatcttcaaacttatgtaaaaggtctatgacctgattactattaagcccatcgatttcaatttgatcatctgacttagaaatttgtttaaaattagtagaaaaagtttgcccttgttttaggcaaattagcagccgactgggtgcatacatctctttaatttcttctgcagagccttctgctaagacattgccattttccaaaatatacatctgatcagcattttcagcttcctctaaatagtgtgttgtcaagaaaatagtcaacccctgttctttttgaagcttttgcaataagtcccagataacaattctcgtttgtaaatctaaccccgcagttggttcatctaaaaataagatatctggatgatcaattaacgctctagcaatatccactcttcttttttgtccaccagacaaagtaccgtatttttgattgaggaaacttctaataccaatcaacccaatcaatttttctaaccactctttagaaaaagttttgtacatccttgcccttaaatatagattctctttgacagtcaatacatcatctaaaacactattctgaaagactactccgatttttagatccttagcatacgtgatagtgccactagttggtttcaataggccaattagtatgttgatagtagtagatttacctgcaccattcgtacctaaataagctaccaactgtccacgattaatcttcaaattgaccttgttcaaggctaacttcttaccatattttttagttagattaaaagtttcaattaacataaaaagacttcctttctgaattcataatcagaatacagaaaagaagcctttttgtacttaaacctcaaataagtggttcatttttacacacaaggtgcaaaatagctaaatcaaaattgcattattcatctatcttaacgtattgtcctttttcatctacaacacctttgaaatggtgcatgctgccatcttcggcctgaaattcacctaagtcaatttccccatagccctttgtagaatcagtaaccttaacatcatcaaaagtttctctgaaaaattgatgaacaattctactcttcaaccgtatatcctttgaatgctcaaaggctgcagacaacgtaaagccctcatctaattgttccttgataaaaacaattagatacaaggtcgctaaattatagcggcgcacaccactttgatcatctgaaatcggcttaatgtagcccttagtttcccaatagcgcaattgcctttgcgaaacaccagtcaatttactaacttcaccgattccaatttctaaattttgaaaaatgtcatgcataatttttttagatttcatcctgataccaccttacagtatagttatattttatatattgttgttatcttttgcaacacttgtgttaatttatctaacttatttgtaagattatttgacaatggcaaattttaagcctatagtttttatagttaacttttataagagaaaggaatattacatgaacaagcaaccaacggatattcatggaaaagcttataatcgaaacctactagttttagttttaattataggttctttctgtactgtattaaacggaacactgctttcaacagcgcttccttcaattatgcgttcatttaacatcagcaccgcaactgctgaatggctttcaacagcctttctgttagttaatggtgttatgatcccaatttctgcatggctaatcaatcgcttcggttcaagaaaaatgtatttgtcagccatgtcaatcttctttattggaacagtgatcgccgcaattgcacccaattttggcaccctgcttgttggaagaatcattcagggattaggcgtcggcgttactatgccacttttacaaacaattatgctttccatcttcccagctaataaacgtggtgcagcaatgggaactgtcgggattgttattggcttagcaccggcaattggaccaacattatctggttggattgttgataacctttcttggcgttatcttttcagcatcattgccccaattgcgggaatagtaattatcttagctttctttttaattaaagatgttttaccaactaagaaagaaaaaattgatgtttggtcagtaacaacctctactctaggcttcggaagtctgttgtatggtttttcagaagctggtaacaaaggctggaccaatcccgagattttaggatttattggatttggaattatatttgtaatcctattcggtatccgccaattgaaaatggatgacccatttttggacattaccgtttttaaacactttgaattttcactggcagctgccttaagtggtatcaccaacttagcgatggtcggcattgaaatggttttaccattatatattcaaaatttgcgtggcgtttctgccttccattcaggtttaatgttactacctggtgcattgatgattggtattatgtcgccaattactggccgtttattcgacaaatatggtgcacgtaaaatggcaattactggtatgactttgttgaccattgggactattccattcgtctttttaactgaacaaagttcatacacgatgattatcattctttacgcaatcagaatggtcggtgtagctttggtaatgatgaatgttactacatctggtatgaattctttaccattaaacaagatttctcacggtactgctgttaacaacactttcagacaggtattaagttcaattggtactgcaattttggtatctgttttaactacaactaccaataataatatgcctggtaaaagtttacttcatgcactgccacttgaatacaagactagagcaatcagtgcaactttagacggttttcatgcttcatttgcaatgagtatcctcttctcattaatcgcattagttcttgcattcttcttaaagaagggcaatcgagcacgtgaacatcaagaaaaggtggatggttaaatgatacttttaattctaatcgtagctgcaattatgtttatttactttaatatcatccctggaaaaaggcatacttctattgcatggctatcattaatcgtaacaattctttgtgttgttggcattgtagaacatgattataatcactggggaatgaaaactgaaacaactttaagcactaatactctagtttccagtgctactcctcgcctgccaattttgctttatcagcctttaggtaatggaactgaaaaagtttacctttataaaactggtcagcttcaaaagaagccaaaatctattaaattagataaagtatcgacaaaagtaaaacgaagcagccaaccaaaagtaatgattaagactactcgctacacctatagcaatacctttaatcaaataatgtttggcgtctttggtcatgacaaggagttaaaacacagagaatatattttttctattccctccaactggaaagtaatgtcagttaacgatgccaagcagttgcaaaaacaaatgatgaaaaaacagcagtttttaaaacaaaaatcagcccaataaaataatgaagctcaaactttgatcatgatatgaaccccgaaattcggacatgaatttcggggtttttatttatggctaaattatctaaacatgacaaaattgatatttacaatagctagaaaaattaaattcattttaactcaaattttaccatatgatttaagttaacttaaatcacctttacaaacgcttatgaaatataatttaactaaatctaaatgtagaaaattatttttatcatactgcctatttcaattgcatcctatcattaaagtaatttttataagccaaatagccactaatcacggctccaaggccagtggcagaaagcaacataaatgtaatcataatctgatacttaattgcataaatgggatttacaccagcaaaaattaagccggacatcattcctggcaaatttactaatcctacagttttagccgaatctatcgtaggctgcatcgcagtcttaatgctccttcttaaaattggcatcgatgcagttttaatatcactacccaaagccaacttttctaaaacttgttgatgcagatcattaaagctatcattcaacgctttatagcataagccaactgccaccatttcatttccagcaatcatccccgtaatgggaatgacctgcatagggactggtttaattacgccagaaaaaatcagaattcctaatgtcacgtaagtccctaccgcttcggctattatcgaattccaaatattccgccccggattaggatcacgctgattagcattccaagatgcattaaaaattatcacaatagttgaaaccaaagttagccacaaggcattaacatgaaaaataaacttcaaaacgtagccgattacgactaactgaattatcgccctaatcacgctaattaaaatatccttggttagtcctaatttttctttcgcagaaattccaatggaaactaacaccagtgcaaaagctaatactaacgaccagttgctaactacaacatttttcattcgattattccgcctttttttactcttaaaatattacttgcttcatcaatttcactttgatcatgtgtaacttgaataattgtcacgcctttctcagaaacatccttaatcaaattatgtacaatatctttactttgattatcaagcccggtagttacttcatctaagagcaatatctttggtaaaaatattatgtttcgaattaacgcaactctttgcttttcaccacctgataaagcagtaatctttttatctaaaaaatcagcagagagatcaacttgattaagtaaatcagctatttgcttgtcatttacatctacttttctaatttcatacgggaaaatcaaattatctcttactgtttgcccaaataaagacggctgctgaaaacaatatgaaacttctctacgatattgaactggatttaaggagctaatgtttttttcttgatatagaatatcgcctgaattagcactaattaaatttgcaatcaatcgtaaaatcgtactttttcctgcacctgatgggccaattaaggttagaaaatcgcctttattaaccttaaatgatacatcttgcaatatttgttttttatctgcactatattggatatgttttaattctaatattttcattcttttgcctaactaaataactcatttttctaattatacaactaaaaaaataaaggaaatccaatattttcattgaatttcctttatttaaattaatatcgataatgattacttagtcaacttttgtttactttcaagtaattcagcacgttgagctaagttcatgtataacttgttgttgtaggttgcgataccttcaatttcacgaccagtgtggtattggtaagtatccttaacttcaccatcagttgcaatcttagcaattacgtcattgaatgcaaggtagaagttattgttcttggcatcataagtaaacccttgagtgtatgtgtttgctacaatgccacccttagttgcacctaccatagttggataccagttatcgcctttgcggttgaattcccagtattcagtttggtctttttctttattataaagagttgtgtaaagcttgtgatcatttacaacaacaccattattgaagtaacgaccgtctgaatcactaccgttccagcatttaatagtccaaatcttgttaatgcacatatcgctcttccgaatttggattaactcttcagacatattgctcttgtatgaaaccttattattgttatttagaacgtaaatgtatttatcagttgagcccattgcttgaccgtgaccaattggaatatatggactaactttaatgttcttaacgtaagaattgaacttcttttggctcatatcaagtaagtattgtccgttaaatgcattggttaaatggttaagattatatcctacaatatgaccattgctaatcagggtactacttaataaactagtgtacaaccagccatttgacatggtaattccttcaggaatatgacctacacggttaatatagtcatcatttttaatgtcacggtaaacacttaataaaactggttggaagaagcgagtagtgaaatctaattttccgctttcactatcataagcatgcttattcttatcaggagtaaaatcagtcttagttacatagttagcagaactgccgtagtaagtcttccaggatttcaaatcgccgttaaatggcttagcttggacgctatcagcatcagcaattccttccttagtactctttctgacagttaccttaacagttgcctttgctttaccatagctatatttaacattataggtacctggagttgagcaatcgattgcatcttctgaaatcttaatatctgctgtatcaattacagtacccatataattggttacataacttactgcatcagttggatcaaaatcgtagtgactattttgtactaaactgatagtctttggtacagcgatagcatctcttgtaaagtagttttggttaacataaccaactttacgaccatttacataaatacgccaataagttgcatcctttgtcttaattctctggtcagattgaatatgagcatattgataatcgctagcatcagcaatcttaccactaggtttaccattactaatctttttataaacaggataattcttattgctacctactttaaccattaagtcataagaagtacttgtttgagctggtcccttcttcgcactggaatcagtcttagcagtatctgtattactatcagtagttttagaattatctgcaaatactgcatttgtagaaccaattaacaaaccaacacccagtgctacagctgaagtagcagttaaaattttatttgaatacttcaaacctatcctccgtatcttatattttgcattttacttttatattataatatataaacactgttagctaaaatacatttttattaccattgttaccattgagcttctttatttgacactttcattacgaagtgatttaattagcactgtacttgaaagagtgctaattaatacgaaatcaattaggaggcaaatttatgctagtacctacagttattgaacaaactgctcgtggtgaacgtgcttatgacatttactcacgcttattaaaagacagaattatcatgcttagcggtgaaattaatgaccaaatggctaactcaatcatcgctcaattactcttccttgatgctcaagacaataccaaggatatttcactttatatcaactcaccaggtggtgtaatcacctccggcttagctatcatggataccatgaactttattaagtcagacgtatcaactattgcaattggtatggcagcttcaatggcttctatccttttgactagtggtaccaagggtaagcgtttcgcacttcctaactcaactgttttaattcaccaaccattaggtggtgctcaaggtcaacaaactgatatccaaattgcagctaacgaaattttgaagagccgtaagaagatcaacgaaattttgcacgaaactaccggtcaacctttggaaaagatccaaaaggatactgaacgtgacaactacttaactgctgaagaagccaaggaatatggtttgattgacgaaatcatggttaataagaagaagtaattaattattaaaaattattcacactctaaaaggagcttgcactcattgtgcaggctcctttttcttattctcttaaactctcagctaactcatgtagtttcttaaatcggtgattaactcctgacttcgaaatcggaccatccggaatttgattagctacttcctttaaagttaattctggatgcgccaatctaaaacgcgctaaaacttgcaatttctctggtagatcatctaagccgttttcttgttcaatcagctggatgtcttctacctgcttagctgaagctgaggctgtttttttcatattcgcggtatcacaattaaccaagcgattaaccgaatttcgcatatctcgcataatacgcaaatcttcaaagttaagcattgcattaagtgcacccactatatgcaaaaagtcgccaatttttgcggcttcttttaaataaacaatatagcctcttctacgtttagttgctttagcatttaaataaaaataattattcatcaacttacataaatcctcattatggtcctcataagttgaataaatctccaagtgataacgactcgtttctggattattgacactacctccggctagaaatgcaccgcgtaaataggacattgctccttcacgtgaagtcataattctctgcggaattcgcgttaccaaacctttttcaggatcccagatttgtaagttttctaggatttcttgtaccttctgattcaatcgtaccaaatattgattattttttttcaatttcatcttgcgcgagacaatcagcaatggctcaataccataagcaatcttaatcagcttaaaaattcgtcgagcaatcgcaggattttctgtagttatatctaggctaaattgatgatcgtgcaagtttaatacaccattcattcgcaaaaaagcagctaactctgctttggcatgctctggatgcacctcaagcgaagttagctcctttttgacttcactagcataactagccatcattttccttcattcttttacgtgacattgattcaaatgccagattaataatttcttttcctaccttttcaccatcatgaaataccaatccatgacgttgatcgataaagtcatcagtaatgacacggcagttttgctttcttaagccttcaaagtcattcttaacaggctcaagataagcatcataatcttctgggtgaaatttgctcatatcaattttggcaccattaaccagagcggtattgatataatttccacctaagtgatcgttaattacctgtacgtgttccgcatcactaaagtgatctgtctcaccacgctgagtcatgatattgcaaatataaataacctcggcgtcagtctcacgcactgcttcacctaaattagagatcattaagttaggtaaaattgaagtaaataaactacctggcccaagtacgactgcatcagcttgcataatcgaagccagtactggtaaaacagctctaggctcttcatccgaatcagtatcggtcacccagacacgcttaatccgcttatctttagatgtgatttcagtttcaccagactccgtagttccatccacgaattctgcgtttaaagtcaatggttcattggatgctggaaaaacatgaccatcaattttcatcatttttgacaaagattgaactgcatcaaagatattgccatgcatttcattcaatgccgcaataattaaattaccgattgcatgtcctgaaaaaaaggaatcggatgaatcaaatcgatactgaaaaatattcttttcttcctgaggtaagtcactaagtgataccaaaacattacggatatcaccaggtggaactacgttaataaagttacggattgaaccagatgaaccgccgtcatctgaaaccgttacgattgcagtaatttccgcgttttgatcttttaaggcattcaaaataactggtaaacccgtaccgccaccaattacgactacacggggacgtctgcctttaatcacgcgaacaatccttgtttctccatatggcacaggtgcgcacctactttctaatataacgactcacttcacggtgagtaatatcgactggatattttttagctaaatctcgtgccaactgttgggcaattgaaacactccggtgttgacccccagtacaaccaattgcaatggtcaacttttccttcccctctttgatatatccagggatagctgtttcaagcaaatcaagcaattttttataaaagacctgtgtttcttctttgttcatcacatagtcaaatacacgcttgtccagtcccgtaaatggtcttaattctgaaatataaaatgggttaggcaaaaaacgcacatccattacaatatctgcatcaattggcatcccatacttaaagccaaatgacatcacttcaattgaaaatggctgccgcttgcgatcactaaatgtattgattaatttttgctttaattccttagtcgacaagtttgacgtatcgataatataatttgatctatttttaattggcattaaaatacgacgttcttcttgaatgccatcaagcaagcgacctttgccattattggctaaaggcggaagacgccttgtttctttataacgagcaaccaagacatcatcggaagcatccaaaaataggatagtagcttgcacattgccattatcttcaagtgaattaacttcatccaataaatcgcgataaaatgtcttaactcgtaaatcaattactacggctaccttatgaaagtcattggaattattaattaaatcccaaaaactacctaataaagttggaggaagattatcgactacaaagtagcccatatcttctaagtcatgagcgaccacagttttacctgctccgctcatgcctgtgactattaataattgttttttctcatcagccatactgaaatcctcctctttacaaattatatcataccgggtgtgtcataattgtgcaaaaaaaagaagcctttcggcttaaatttttatcaaatattaacggtgcataaatgcaaccacaatttcattaatgccaaagactaataaccagaatgcaactaaccatactaagcttaaggctgcgattactggattaataattaagaagaaggcaataatcaaacttaaaatattcaaaatcaagttaaatacaaagtatccggttgaaaatgcacgtaagtgccatgaccaagcaatacctacaactgaatcaacaaagaaccagattgcaaataagtaagcgatagtcaaaccaccaatatcatatgagcaaatgaacaagataccgataatgatatctaatacacctgacacaattgctacccaactacgtgagaaaaattcacgaaagcgtgagtaagcagccaaccatacaataccttgaacgattgatacaatagcaaaaatcaagacaaatgcatgcaaccctttagctgggtgacgtaataacacgaacgcaactacgaccattaagataccggcaataaatgcgccccagtcaaagccgtgattatctctagaactagaaaaaatatccatttttattcctccttgcagactattttacacttattcaaggttaataaaaactattggctattgtcttctagcctatttttttgcttcttttgttagtttagtatcacgttctaagactggtttcaaatactgaccagtatagctttctttaactttcgctacttcttctggcgtaccggtagccacaatttgaccgccacgttcccctccttcaggacctaagtcgatcagccaatctgcatttttaattacatcaagattatgctcaataattaaaaccgtattgccttcatctaccaaccgctgcaaaacttctaataaacgcttgatatcatcggtatgcaaaccggtagttggttcatcaagaatatagaaatttttaccagtagaaagcttttgcaattcagcagctaatttcattctttgagcttcaccaccagataaagttgtagcggattgacctaatttcacatagcccaaacctacatcaacgatagtctggagtttacgctgaatcttaggaatattttcgaaaaacttagttgcttcattaatcgtcatatcaagcacttgagcaatattctttccccgataagttacttccaatgtttcagaattataacgagtgccgtgacaaacctcacatggtacatatacatcaggcaaaaagttcatttcaatcttgataattccatcaccatgacaggcttcacaacgtccacctttgacgttgaacgaaaatcttgctttagtataaccacgcaattttgcttcattagtttgagcaaataaggttctgatatcatcaaaaacactagtataagttgcaggattactacgtggtgttctaccaatagggctttgatcgatatcgatgattttttcaatattcttgtaacccttgattgacttatacttacctggcttagttgaattattgtttaatttttgggctaaagcgcgtttcaagatcatattaaccaaagtagatttaccagaacctgagacaccactgaccacaataaatttgcccaacggaaaatcaacattaatattctttaaattattttcttgagctccagtaattgtaatctttttaccattgcctttacgacgcttcaatggaaccggcacaaattttttaccagacaaatattgccccgttaaagaatcaggattctgctctacttctttaggagttccttgtgccataactttaccaccgtaaacaccggcaccaggtcccatatcaaccaaatagtcagcttgccgcattgtttcgtcatcgtgctctaccacaattaaagaattgcctaaatcacgcattctctttaaagaagcaatcagccgatcattatcacgttgatgcaaaccgatagatggttcatccaaaacatacataactcccgataagtttgagccaatttgagttgccaaccgaatacgctgagcttcaccaccagacaaggtattagctgatcgagaaagagttaaataatctaatcctacactatccaagaatgaaagacgatcgcgtacttcctttaaaatcggcttagcaatcatagtctcttgctcgcttaatttgacgtccttaaagaaatcaagtgctttatcaatagaaagctccgaagcttccgcgatatccttgcccatgactttcactgctaatgctttttcattcaaacgcttgccgtgacaagttgaacaagtaagttcagtcatatatttgcccatcacatcacgcataaacttggacattggtcgtttataacgccgctcaacattggccattactccttcaaatggttgaacggtatcattaacgccaaagtcaccagttacatggaatttcaccggcttagttgagccatgcagaataatgtcgcgttgacgtttagttagtttattaaaaggcttatccatcggaatttttaatgccgtgcaagcttgttccaacatttcagtatagtaattggaagtcttccatggagccagtgcaccttcagctaaagattttgttttgtccggaacaaccaaatcttcgtctactgctaacttcatccctaacccatcacaatcaaggcaggcaccaaatggtgcattaaaggagaacagtcttggttccatttcacccacagtaaagccacactttggacaagcataatactcagaaaagttaagcatttcaccaccaattacatcaacattcatgtagccatctgacaaacgaagtgcagcttcaatagaatcaaataagcgagacttaatgctatccttaacaatcaaacggtcaacgacaatatcgattgagtgacgcttgttcttagctaattcaaaatcctcaccaatttcgtgcatctcaccatcaacaattacacgaacatatcctgcacgttgcactcgcttaaatacttccttgtgttctccacgcttagcacgaataactggcgctaaaatttgaattttcgttctttctggtaaagccatcactcggtcaaccatctgatcaactgattgtcgttgaatcagcgtcccatcattaggacaaattggatggcctactctggcccaaagcaaacgtaaataatcattaatctcagtgacggtcccaactgttgaccgtggattatgtgacgttgttttttgatcaattgaaattgctggatttaaaccatcaattgaatccacatctggtttatccatttgccccaaaaactgtctagcataactagaaagtgattgcacataacgtctacgcccttctgcataaagcgtatcaaaggctaaagaacttttacctgaaccagataagccagtaataactactaacttatccttaggaatagttaaattaatgtcttttaaattatgttcacgtgctccgcgaataacgatcttatcatttgccattaaaattctttccttttcttgatgatttttgcaattccataattgcatcccgcaagttagcagcttcttcaaagtcaagcttcttagctgcttcttgcatttgctcttgcaagttgctaatcattgtcttcttttgcttagccgtcaattcatcaaaattaagatctgcaaaactatcagatttttcttctttttcactcgacggtttagtaatcgaaattacgtcttgaatcggcttaatgattgtcttaggcgttatgccatgctctttgttaaattccatctgaattttacgccgacgcttggtagctttaatcgctgctctcatggaatcagtaatcgtatcagcatacatgattacttcaccattggcattacgggcggtccgtcccatagtctgaaccagcggccgatatgctctcaagaagccttccttatctgcatccagaattgctaccagtgaaacttccggtacatcgattccttcccgcaacaggttaattccaattaagacatcgaacttacctaaccgtaagtcacgcaaaatttgcattctttccagcgtcttaatatcagagtgcaaataacgtactttaattcctaagtccttcaaataatcggttaagtcttccgccatttttttggtcaaagtagtaacaaagactcgttcatgacggtcaatccgtttattaatttcgccaactaaatcatcaatttgaccctcaattggccttacttcaatcttgggatcaagcaatccggttggtcgaataatttgttcaaccttatgatctgttcgttcaagttcataatcacctggggtagctgagacatacaaaatttgattaacatgcttttcaaattcggatagctttaatggacggttatcaagtgcagatggcaaacggaaaccatagtcaatcaaggtttgcttacgattacggtcaccattgtacattgctctaatttcaggcatagtagcatgtgattcgtcaattaaaattaagaaatcatctgggaagaagtccaacaaagtatacggtggctctcctgcttttcgtccttccatatgccttgaatagttttcgattccgttggtatagccaacttcacccatcatttccatatcataggtagtacgttgcttgattctttcagcttcaagcaatttgccttcgccttcgaactttttaacctgcaatttcatctctttagaaattgctcccaaagctcgccgcaattgctcgtcattggtcataaagtgcgtagctgggaaaagcgaaatactctcacgctcaccgatcacctcaccggttaacgaatcaacttcaacaatgcgatcaatttcatcaccaaagaattcaattcgataagcatgattagaattgccggctggaaagacctcaactacatccccgcggacccgaaaacgaccgcgttgaaagtcaatatcattacgatcatattgaatatttaccaaatcacgcaacaaggtattacggtcatattcttcgccttcatggatcatcaagacactgcgcgcatactctttaggatcacccaaaccatagatacaagaaaccgaagcaacaactactacgtcattacgctccattaaagctgaggtagtagcatgccgcaactgatcaatttcatcattgattgccgaatccttttcaatataagtgtctgattgtggaacgtaagcttctggctgataataatcatagtatgaaacaaaatattcaactgcattattaggaaagaaacttttaaactcaccatatagctgccctaccaaggtcttattatgcgtaataactaatgtaggcttattcagcttagcaataatattggccatggtgaaagttttcccagtaccagttgcaccttccagaatctgttctttatatccttttttaaatccagcagtcagtttatcaatagcttgctcttgatcaccggctggtttaaactttgatactaattcaaatttgcgatttttttgtcgtttaatcataaaaaactcctcaagaaaaaagttggacaagcatagtccaactttttaattagtatctatattttactaccgcgaacgtgctttcgcacgaaaaatgcttaattatttaagtaaatctgctaaagccttttgataatcttcagctgccttttctgcagtggcaatgtcttttttgtttacaccaacataggccttaattactggttcagtacctgatgggcgaagtgctacccaggtttcatcatctaagaagtacttcaacacattagattctgggaacccttctaatggtgtctttttgccattttcaatagtttctttttgcaagaaatcttgaatcttaagcactttactaccgccgatttcagttaagtgctcattacgcaacttgctcattaattcggccatcttcttttgaccaccaatacctggcatttcaattgcacgggtaatttcataagcaacgccatacttttgccaaatttcttgcaaaccatcaaagacagtcatcccacgtgaagcatagtatgaagcaacttcggcaaacatcaatgcaccctgcatggcatccttatcacgagcaaatggtttaaacaaatagccatagctttcttcaaagcccatcaagaacttagcatcaccagctttattcatccggtcaacttcttcaccaatgtacttaaagcccgtcaaaacatgcttagtcttaataccaaagtcctctgcaatcttaaatggcaaagcactagaaacaactgaagtaacgatctcataatcaggggttaattgaccattttccttcatatgagccaataggtagtaagccatcaaagtagcaatttggttaccagtcaaaacttggaaatcaccatcagtttttctaactgctgcacccattctatcagcatccgggtcagtagcaataatgacattagcatttacctcatttgccaacttaaaaccaggttcaaaaacatcacggtattctggattaggcttaattgtggttggaaattctggatcaatgattgattgacttggcacaggaatcacattatcaaagccgccttgtctgaaagcacgatcataaagcatcttgcctgtaccatgaagtggagtataaatgatctttaacttgtcagcgttggccttaaccatctctggatcaacagttacttgcttcaattcattcaagtaatcttcatcaacatcttcacctattaactgcaaggtgccattagcacgcaattcttttactggtgcagccttgacagcaaaaatatcagttactttttgagcataagcaaaaagtcgatctgcattatctggtgccatttgtgcaccatcttcaccgtaaactttatagccattgtattgcttagcattgtgtgaagcagtgatattaattccagcgaaagtatgcaaatgacgtactgcatatgaaagttctggtgtcggtcttaaatcatcaaataagtaaacatgaattccgtgtgcacctaaaactctggcagcatgttctgcaaactctcttgagtgatatcttgaatcaaaggaaatagctaccccacgctttttagcatcagcaccattttcttcaattaaacgagctaagccttcagttactcgacctacagtaaacaagttaatccggttggtaccgggttcaagacgaccacgcatccccgcagtaccaaaattaatatcctgtccaaaggcatcttcgatccatttttcatccttgcccaaagtatttaattgatcttttaaataatctggtaaattagtagctttttgccattctgtataaatttctttagcgtccatcaatgtcctctattcattaaaagttggatttctaaagcgctttcaaactgttaacaattttctattatctgctattaattataaaacttattagtcattaatttaagctttagacaaaaaaagacatgtccaatacgaacatgtcttaatgaaaaaacgaataaatttaatttttcttgtcttgtaagtcttggtagtaattatatgcagcttgaccagctacactaccttcaccaactgcattagcaatttggcgtaaatctttttgacgaacatcacctaaagcaaagataccaggcaccttagtttccatatgatcatcagttacaatccaaccatggtcatccaagataccaagatccttaaaaggttcagtttgtggtaaaacacccacgtaaataaagacaccagcaactggaatttctttttcggcaccagtttccttatcgcggtacttaacccctgtgactttcatgtcatcgcctaagatttcttcagtttgtgcattccaaatgaaatgcatcttcttgtttgcaaatgcacgcttttgcaaagttggttgtgctcgcaattgatcacggcggtgaataactgtaacgctcttagctaattgtgaaagataaattccttcttcaattgctgaatcaccaccaccgatgacagctacatcttcatctttaaagaaagcggcatcgcagacggcacaatatgaaacacctttgcctgaatattcttcttctccaggcacattcaaatgcttatgatctgaacctgtagcaataattacgatcggtgcacgatactcattgccatcatcagttttaactaacttatcctcgccatcgagttcaacactttgtacgttgccatacttataatctggttcaaacttcatcattgtgtcgtacatcttttgactaagttctggacctttgatttcagaaaaaccaggataattgtcgatagcatcagtattgttcatttgaccgccatagggaccgcgatcaagaacaagaatctttaagttagcacgcgcagcatataagccagcagtcatcccaccaggacctgcaccaataataattacgtcgtatttatcagccataatctatccttctttctacttacttttgataagcaaataatacaatagatttaacttcttgccaactattttgcttatcttttataaacgaatttcaggctttggttctctacccatcattttcttaatttctgtatcaacatcagcatcttcataaagaacacggtagattgcctctgaaattggcatatcaatgcccttttcttcacataattcgtgaacagctttaacagtagtagcgccttcgacaacttgtcccatatttttcaaaacgtaatctaaagtcttgccttcgccgatttgtttaccagcacgccaattacgtgagtttactgaagtacaagttacaattaagtcaccaatacctgacaagcctgagaaggtcattggcttagcaccaaagtattgcacacccaaacgagtgatttctgctaaacctctagtcatcaaggcagctttggcgtcatcaccatatcctttgcctactaaaatacctgcagcaatcgcaattacgttcttaacggcaccaccaacttctacacctactaaatcatcgttagtgtagaaacgaacgtagtcattggagaacaattcttgtacccgcttagcattttcttcattagttgatgcacatgcaatcgcggttaaatctttttgagcaacattttctgcgtgactaggacctgaaattgcaacaatcttatcttcatcatctggataaatttcttcagttaaaatttcagaaataagcttcttactgcctggttcaatccctttagttgcagtaactaacagtggcttagcacccgtcttatctaaaaccttgcgtacgtttttagcaacgattctaactgccttagttggcaaaacaaataaaacaagttctgccccatcaagagctgcttccaaatcaccagtagccttggtattctcatttaatttccaatccttcatatagtggctattggtgtggtgagcgttaatttcttcattaacactatcaatgttaccgtaaagagttacatcgttaccattatcggctaacattgaacccaatactgaaccccatgaaccattacctaaaactgcaatctttgtcattttttctctcaaactttctaattaaaatcttttattaattctaatctcttgaatacgggtattttaatccactaccatccaaataccattttggattaacgactttccgccgataaatccataaaataattgtagcaataaagaggattaaacttaatgcctgtgatactcgtattataccaaaaatatacagactatctgtcctcattccttcaacgaagaaccttactacactataccaaagaagataggtcatgaaaacttctccctgcttgaagagatgttttttatgacgcaaggatagaattaagattaagccaatcaaattaaaaaatgattcgtacaaaaaagttggttgataatacgtcccgcctattttcatttgctcaataataaattgtggtaagtgtaagctttgtaaaaaatgaagagtagttggtgcgccgtgcgcctcttgattaacaaaattaccccagcgtccccaaatctgagctgccatgactccaggagcaatgatatccagcattaaaaatggaggtagcattcgtttataacagaaaatcaacagcacaattaagccggcaattaaaccaccataaatcgcaatcccaccattccaaatcgcaataatttgctcgggatgctgtgaataataaccccattcaaaaatcacataataaatacgtgcgccaacataccctaacggtactgcccacaatagcaaatcgacaaaatcatctggaataatttgacgtttttttccttcgttaatcgccatccagcaagctaacataatggctactgccataatgatgccataccatttgacacttaaattccctaaatgaaaggccaccggattaattactaaattagtcattatgcggcaccttattcgtatcttcttttgagtgctctgaaatcagactagtcaaattattatcaaaagtttgagttgcatcatagcccatcttcttagctctgaagttcatcgctgcaacttcaataataatttcaatattgcgtccaaccttaactggaatattaacctgtggaattggtacattgcagatttcacgcgtattttcttgaaaacctaggcgatcataattagcttttggatcccaattaaccaaattaattaccagttggatttctgttctattttttacggcaccggcaccaaataaattcatcacatcaataatgccaattcctctgatctccattaagtgctttaagatctttggtgcttcacccacaacggtattatggtctttttgaaaagcatctactcgatcatccgcaattaatctgtgtcctctttgaactaatcccaaagcagtttcagacttaccaacaccagatgcaccagttaacagcacacccatccctttgatttcaaccaaaacaccatgaatgctggttcttttggctaaacgagcacgcaagtattcagttaaaatactggatatgtaggtagttgactctcttgtacgcaaaattgggattttgtgttcctctgctgccgtagttaattcttccggtacaggcaaagagcgagaaatcaaaaaacacggtgtagccttagtacacattttgttaaagacatgcattctaatatcatggtccaagcgtgccgcatatgaaatttctgtccgacccaataattgaattcgttgcgcaggataaaaatcaaaataaccagttaattctaatccagggcgataaatatcagaaacataaatttcttcatctttgatatattcctgtccttggtaaacttcaaggatactctgattgtcctggatcaatttgcttaatctaacttcatcagccatattaggcctcctaactatttatcaatatctttagtggtgacatttctagctttttttcttggtctaggaccagaagtactagtagccttaaaccactcacgataacttccactacttggcatattatcttgatttttccttccagtaaaccgataaataagccaaatgattaaaatcgcaattacagctactggtaaaagtaaaataaatgccttaaatagaacaaacaataaacttaaaataattagcgctactaaaacaagcgttacaatttccattaaactcattttttaacctaatctggattctcttgactaagcaaccactgtaaataggaataaataaacggttgcaattttccgtccattactccttgagcgtcagctgtttcatgacctgtccgcaaatctttcactaggttgtaaggatggaaaacatatgacctaatttgtgatccccagccaatctccttttgatcgcctttcagagcctgcttttgcttacgctttttttcttcttctaagtgaaaaagctttgctcttaattcattcatcgcagtttcacggttttgcaattgtgaacgctgtgcctgagacgtagtcacaattcctgttggtaagtgcgtaattctaacggcactagaagttttattaatatgctgcccaccagcaccactagagcggtaaacatcaacccgtaaatccttaggatcaatatcaatttgaatactgtcatcaacttctggaatcacttctacagaagcaaatgatgtatgccgtcttttagccgcatcaaatggcgaaattctaaccaaacgatggacaccattttctgatttaagcattccgtaagcatttttacctacaattcgcgcactaacgctcttcaacccagcttcttcaccaggctcataatcgttgatttcaaatttaaaaccagctgtatcacaataacgttgatacattcttagaagcatctgtccccagtccatcgcttctgtaccgccagcaccagggtgaatttccatcaaagcattatggctatcatacttacccgacaagagcaggtctaactcataattatgaaaatcttcttgcagcgtagctagatccgcttcaacttctttttgcaagtcaggatctggttcttcacgcaaaagttcaaccgcagtagtttcgtcttcgtagctagtttgcaattttaaaaatgaatcacgtttttcctttaatcggttggtttcactaattaatttttgcgctttttcctggttattccaaaaatcaggctgcgccatcttgttttcattaatttcgatgctttcatcaatcgcatctaagtcaaagagaccccctaaagtgatttagacgtttttttagttcatctaacacactttgaatttcactaatttccatttttacctaccatcttttattttattgcaaaaaaagggaagctcttaactcccctttttctttattaacgactaagattttgtctaatttcagccttcatgaacaaacgagttacatcaaattcaatattggaaatcatttcttcaaacattctgtaaccagaatcttgatattcaactaatgggttcaattgaccgtatccacgaagaccaattgattgacgcaactgatccattgcatcaatatgatcagtccaacgatcatcaaccacacgcaagataactaccttttcaaattcaagcatttggctaggatcgcctaaggccttttccttatcttcgaagttttgctcaacaatgtcataaagcttcttcttcaaatcttcaacactaatagtcttgaagtcaattgagtcagttaccttgtctgaagtcaaacttgaggaaatgaaatcgcgtaatgagtcaagacgccattccttgcgttcaccttgagtaaacattgctacttggtgatcaattgttctgtgaatcattggaattaaaacattcttcaatgacttatcagcttcaatgacctgcattctttcgccgtagataatttcacgttgaatacgcataacatcatcgtattgcaaagtttgcttacgagtatcatagttattaccttcaacacgtttttgagcagattcaacttggcgagtaatcaagcgactttcgataaccttatcatcatcattatctgataaacgatccaagaagtccttaactcgatcaccaccaaaacgcttcatcaaatcatcttcaagcgacaagtagaatctggtgtaacctgggtcaccctgacgaccagaacgaccacgaagctggttatcaatacgacgtgattcgtgacgttcagtaccaataactgccagtccaccaagttctttaacaccaggcccaagcttaatatcagtaccacgaccggccatgttagtagcgatagttacggcaccacgttgaccagcgttcatgatgatttgagcttccttagcgtggttcttagcgttcaaaactgcgtgaggaatacctgctttatcaagcatcttactcaaacgttctgaactttcaatggcaacagtaccaaccaaaacaggttgaccattagcgtgacgcttcttaatttcttcaactacagcgtggaacttagagtccaaagttggatacaaaatgtctggcatgtcttttctggcaattggacggttagtaggaatcgtgattacctgcatgttgtaaatttcacggaattcttcctcttcagtcttagcagtaccagtcatacctgacaacttcttgtacattctgaagaagttctggtaggtaatagtagcttgcgttcttgattcttcttgaatcttaacgccttccttagcttcaatagcttggtgcaagccatctgagtaacgacggccttccattacacgaccagtgaatgagtcaacgatcaaaacttcgccatcttgaacaacgtagtcgatatccttaagcatgatgtagttggcacgaagagcttggtcaatgtggtgaaccaacttttggttttcaacatcgtacaagttctttaggccaaagtgttgacaagccttttcaataccagttctggtaagtgaaatagtcttagttggccagtcaatcttgtaatcgccgtgatcttcatcatcgtcggcatcatcatcgctcttgtcttcagtcaaagtcttaacaaagcggtcagcacggatgtaatcactgtttgcttgttcagcttcaccagaaataatcaaaggagttctagcttcatcgattaagatagagtcaacttcgtcgatgatagcgtagttcaatggacgttgtaccatttgttccttgtaaacaaccatgttgtcacgcaaatagtcaaagccaagttctgagttagttgagtaagtaacatcacagttgtaagctgcacgcttttcgtctggtgacattgagttcaagttcaaaccaacagttaagccaagccacttgtaaagttgacccatttcttcttcgtcacgacttgaaaggtattcgttaacagtaacaacgtgtacacccttgccttcaagtgcgttcaagtatactggcatggttgctgtcaaagtcttaccttcaccagtcatcatttcggcgatgttaccgtagtgaagtgcaataccacccaaaatttgtacgtggaatgggtaaagtcctaatacacgcttagcaccttcacgagcaactgcgaatgcttctggtaaaagatcatccaaactttcgcccttctttaaacggtcacgaaattctggtgtctttgcttgcaattgttcatcagatagcttgctcatttcatctgcatgagcttctaccttagctgcgattttttcaaatttcttaagttctcttttatcgtcgttatatagtttctttaaaatatttaccattaaatcggtccttatatgtcgtaaagtctaaaaatacagaataattttaacatgtttatcagcaaaataaaaatattctaaacaaaaaaccccacgctcaaacaaacgcgaggttttgaattaacgagtattttaactcaattattcgttagtttcaattaagccgtaacgaccatcgtttctacggtaaacaacgctagtgccgttagtttctgcatcttcaaaaacgaagaagtcatgttccaacatgtccatttgtaaaatagcttcttctggatccattggctttaagcttacacgcttgttacgaacaatatcaaattcgctaggcttcttttcttcttcttcaggttgttctacaaagaaatcttgtaatcccttttcacgactctttctatttacacgagtcttgtactttctaatttgacgttcgagtttttcagaaacgaagtcaatgctacgatacatatcatccgtggtttcttcggctctcaaaactaagtatggtaaaggaatagtaacttcaactttagctgagtgatcacggtatactctcaagtttacgtgtgcaatcacatcttgattcaattcgaagtacttctctaacttgtttaaccgcttttctacataacttctcaaagcatcagttacttcaatattttctccacgaacattgtactttaacatataagattctcctttcaccgctatgcggtttttctttacaaatttattataccaaaaaatgtaagcgtttcataacaaatctaatgacaaattgaaaagctttcaattttcatttcgggaaaaccctgctgtaaacggtcccgcgcgtgatatagcgtgcgcccggtcgtgtaaatatcatccaaaattaatacttttcctgaaactatattttccttgattttaatatttttatcaatcaaaaagctttgaggcgttttaagccgctcctctttgtttttctcaccttgggcatgactacccgattgtttaatcagaagtggtgtcagcggcaaaatatcagcataaatagcaaaaattgtatcaaactgtcgtcttgattgatgttcaggtgaagtgggcacgggcacataaaagtcatagttagttttacacaaatagtcataacacaaatcttgcaatacttcccgcaaaacataatctccacgccgcttatacgcaaccatcaagtcatgaaaagcagaattataacgatataaagcatgattatgcagaatattttcgccataaatggcttgccaatttcgacaatcgctacacataaagccttgacctagttccttatcacagccagagcagcgattgtctgctaacttttcaaattgttttaaacattgcaagcaaattttactttttcgcgctgttttaaaagaaaaaagttgtgcaaattgtaccggtggagtaaactcctgctcacataataaacaagttctcatctattcatccccttgatctgcttaatactctgtcgaatattcttggtataacgatgataacaatacaaaactaagcccgtttggtcatcgtgagcccgaccaactcgacctgcaatttgcaccaaactagcagcggtataaattgcatcatctgctgcaataataattacccaaacatttttaaaagttacaccacgctctaaaattgtggttgtcaacaataagtcatatttacgatcacgaaaagcctgtactttttctaatcgttgcggatcttgtgcatgaacaccggccaatttaattttattttgcaactttttccgcaaagcttcttgataaagcggaatttcttcaatccgtggtacaaacaaaagcaaaggatgaccactttgaatgacttttttaatctcctgcattaatttaggatgaatttgtcccttccgcaaaaacggcctgataaaaagcctttctcttggtacaggcaataatccaccatgaaaacgccgatttaagcgcaaaatttctaacttccctgttttagcttccaaaagcaaatcgttcgttggcgttgcggttaaatacattcgagtcccagttgttttaaccgcatttttggccgcaaaatgtagttgcggattacctacataaggaaaagagtctacctcatcaattaccaataaatcaaaggcacgataaaacttcattaattggtgtgtagtacaaattgtcaactgctctagccctatttccttaaattcacggccatgatacttaccgatctcaacttgggcaaacgctgccgaaaatcttggaaacagctcatttaccacatcaattcttggtgtagcaatacaagcgcgctgtccttttttcatacatcgagcaatcaactgaaacaacatctcagttttacccgccccagttacagcatgaaccaatgtattttttctttgttcaaaattttgtactaatttatccgaaatattctgctgcaatggggttagtttaccttgccagcttaatcccccgtttttaacatgagaaaaagtattattactgtcttttctaataagccaatcgtcctcatttgcacgtcccaagccaatacaaccacgacaataatatttaccattaggcagtcgactattaacttggctgccacagcgattacatttacctttttcaattactgggattttgcggcatccctcaaatgtgctagaatcctcttgactaacaatccattgacgacctgataatagagtcaaatcttccatatttttacctccctattatctattacgcaaaaagaggcgattattttgtcagaaaaggaaaattttttaactattaaagaaaacggcaccggtgaattaattatcaaaaagagcagattcattgccaatattgcccgcaccactactactgatgcggcaaatgattttattcaaaaaatctctaaaaaatatcgcgatgcttcgcacaatacctttgcctacacgatcggcttaaatgacgatcaggtcaaagaaagcgataatggtgagccatcaggtacggctggtgttcctgaattaaaagcattgcaattaatgaatttaaaaaacgttacagtcgtagtaacccgttattttggtggaatcaaattaggagcaggcggtttaattcgtgcctattccaatagtgtcaccaatgttgttgaaaaagtcggcgtcattaaacgcgttttacaacaagaattaatttttagcgtaccctataaccgcttcgatgaagttgatcattacctaaaacagcaaaaaatttttattgccaataccgaatacggtgtggatgttaaaattcatatttttgttaacgatgaccaacaagctaaacctaaggaagacctaactaatttattggccggacaggttacctttactaatggtgaaaaacgctataatgaaattcctgttgaagctaataattatcatgaacaataaaaagagcatttggatatttccaaatgcttttttgctacttattattttttttactcttcaattgatctggtttttcgtctcctaagtgccaaacttcaattgttggatcagttttactcttttgattaataattttctgaattacatgcatcaaaggatggtatttttcacccaataaaccaattgattccacaaaatactctaaggcaatcagcaagcctaagatcagaagccaagtgccccaagttggcgaaagcaggaataataaagaaataaatgagaaaaccaatgataatgcgtaaatagtcaataccgtctgtcggtgcgttaaccccattcgcatcagctggtgatgtaaatgatgcttgtctgcttctgaaattggctttttgtttagctttctccgaatcattgcataaacggtgtcagtaataggcactcccaaaatgataattgggaccaacaatgaaataaaagttacattctttaaccccttcagagataaaacggcgatcataaaaccaatataaagtgcacccgtatcacccaagaaaatttttgctggatggaaattatatggtaaaaagcccaataaacaggcagctaacataaaacaagcaattgggacatatagctgatgagtgtgcaagaagaaataacctacgatccccatggtagtcagagagatcattgaaaccccatcagctagcccatcaagtccatcaatcaagttaactgcattagttaaagctaagatccaaaaaatagtaattgggaaactccaccaacctagatttacttcatgtgcgatgaatggcacctttaacacattcattctgattccagctaaaaagtagataatcaatgaagcgataaaaatcccaaacattttttgtctaggttttaactccaaaatatcgtcgatcaatcccgtcaaaacaattacgcttgaagcgagtaaaatcgaaaaaatttcatgagtcggaaattgctcacgcaacagaacaaaagtaccgatattaaaagtaacaaaaatccccagtccaccaatcgttggcattggtttcttattaactcgccgggcattaggattatcaacagctcctaagacaaaggcaagccgtcgaataaacggtgtaattgccgctgaaataattactaataagaataattcaacaataattttaaacatatttggctactttccttatttacttgttctaattatacaagtagtcagtattttgcacaaatagcaaaaaagtttggaaaaattatcttccaaactttttaatttatttagcgatcgccacaactcttttttcacggataacggtaatcttaatattacctggataatcaagttctttttcaacctgattacgaatatcacgtgccaaaataactgtccgatcatctgaaatttcgtcaggttcaaccatcacacgaacttcacgtcccgcttgaattgcataagcctgcttaacgccttggtagctcttagcaatcttttccaattcggtcaaacgtctaatataattttccaaactctcgcttcttgcaccaggacgagcactagaaatcgtatctgctgcaacaacaagttcagcaataaacgacaacttaggcacatcgccgtggtgtgcagcaatcgcatttactacaacatctggttcatgatatttacgagttagttcaaccccaatttctacatgggaaccttcaatatcatgatcgatggctttaccaatatcgtgtaataaccccgcgcgaactgctaatttttcatccaagcctaattctgcagccatcgtgcctgctagcttaccaacttcaattgaatgtgacaaaacattttgtccataagaagtacgatatttaagacgacctagcgtcttaactaattcaggattcatccggtgaattcccagctccatcaaagcactttcacctgcttcatagatgtcatcgttaacttcttttctggccttatcgaccatttcttcaattctagctgggtgaatgcggccatccttgattaagcgttccatcgctcttttggcaatttcacgtctaattggatcaaaaccactcaaggtaacaacctttggcgtatcatcaataattagatctattccagtcaaagcttcaaatgaacggatattgcgtccttcacgaccaataatccgtcccttcatctcttcatttggtagatcaacaacagatacagttgtttcggcaactgtatctgccgcgctactttgaatagcatccacaatgacctgattagcataatgatcagctttagcttttacttcttcgttactatttctgatcatctcggctcgttctttgactagttcatcagataattgactaagcacaatcttcttggcttcttcctcatccaacttagctacgtcataaagcttttgccgtctagtttctactaattcttcagcctcagttaattttgcctttaagctagcatactgctgctttaattggtcttccttttgcgtgagtccactttcacgttcatctaataaagaattcttatgatctaaggtatcttcacgttgttgtaaacgatttttctcccgagctaaattatctttcttggaatttaactcatcctcggtcttttgcctaaaatcacgaatttgttcttgagcttcaagaattttttcttttttagtattttctgcactttgcttaacagccgctgctgcttgcttttgtgcattaacttcagcttgtgctgcagcaacctgtgccttagcatcagctaaaatgtggtcagcatcattctgggcattttgagctttttgttcccaagaatgcttgcgaattgcataaccaaccactgaacccaccaagaatgaaacaatggcagttgcgacgggaatcataattgttaacatattattcatgattactatcgccttttttagaattattcacacaacttttatgataaagaacctatctgttcatgtcaattaaatcaaaaaaccttggaaaataaatccagggtttttgacataattatttagcttgttcagactttttatctgtagcagcttctttttctgtcttggcttcttcgcgcttctccttgatcttttctggatcttcacgatcagcaattgacttttcatcaatcccgtaagcttgacgcacttgcttttggatatcttgataaatatctggatgctcttctagatacttcttagcattctcacgtccctgaccaattcgatcactcttgtaagagtaccaagaacctgctttatcgataatgtccttatcagcagccatgtccagtaattcaccactttgtgaaattcccttaccgtacataatgtctacttctgccaccttaaatggtggagcaaccttgttcttaacaactttaattttaactctgttaccaagaacatctcctgattgcttaatctgttcagctcttcttacttccaatctaatagttgagtaaaacttaagagcacgaccacctggggtagtttcaggattaccaaacattaccccaactttttcacgaatctggttaataaagatggcaatagttttggttttagaaatattacctgataacttacgcaaagcttgactcattaatctcgcttgtaaaccaacatgggcatctcccatctcgccttcaatttctgctcgtggtactaaggcagcaacagagtcgactactacaatgtcaattgccccactggaaatcaaagtatcagcgatttgcaaaccttcttcaccagtattaggttgtgacaaaattagtgaatcaatatctacacctaaagcttcagcgtaagcaggatccattgcattttcggcatcaatatatgctgcagtaccaccacgcttttgcacctcagctacagcatgaagggctaccgtagtcttaccagatgattctgggccataaacttcaataatacgaccacgaggatatccacctacaccgatagcagcatctaaagctaatgaacctgttggcactgttgaaatttgcgtatcagctttttcgcccatccgcattacagcacccttaccgaaattcttttcgatttttttaagcgctgcatctaaagcagcctgtttttcgtctttggccattaatgtcctcctatttttcgtacctaataattatactttgaccgccgtccaatttgcaagagaaatgcaaacgaacgttcaaaggattttttaccctctattatttattacgctaaaaatcgccattatttttttacaaaataaaaaaagaagcaaatgcttctttttaatcattcttgacttaatactattttacattgagcccttgaatacgccccatgattggtggaagtaatcgtaacctgagtaaatagtaaagatcaacgcaaggtaaagtaagatagtaccaatgtggaagaagtcaccaatcaataagaaaatgattgataacatttggcaagtagtcttaattttaccaggcatctttgctgctaaaacttgtccttcattttctgctaagatcaaacgcaaaccagtaacagccaattcacgacaaacgatgatagctactacccatgctggagcaagtttcaattcaactaagaaaatgaaagcagtcatagttaacatcttatcagctaatggatcagcaaacttaccaaaattggttaccatattacgtgaacgcgcaatgtgaccgtcaaaccaatcagtagccgaagcaacagcaaaaacgatagcagcaataacacgactccaaacaacagttgagcctgctgcttgaacactagcattcccaccaaaaatgatgattaacataaatactggaatcaaaaagattctaaaaacagtaagtttattaggtaaattcattctaacactcctagattttaattgttgttattatttccaccatcattgccattgttagtgtctgctgatgattgagtagtagatgattgttgagtttgactactttgttgggtttgttggctactttgagtagtagtagatgattgttgacgactgctttgacgagtagcactgctttgagtagttgtacggctttgggtagaactactattggttgtattgttattagtagagcccgtattattagaactactattattttgactagtagttcccttagccttaccaatcaacaaagtaattgtcctgtacgcattgtttgctgtatatgggattttcttacctgcaatagtgattgaagtaccattatcgttgcctaaagtaatcactactctctctgcattgcttggcaaagtcatagtgtgcttttgattagcaagtaaagttgattgccagctattagcattaccattgacttgtacacccgctgaaatattttggttttcaccagcacgcacaactaggcgacggtttttattcaagccagtaactcggtactcattgtcactaaccttagtaaccttaactttattgactactacttttttagctttcttagaagatgacgatgatgacttttgtgatgaaacagttacatcattattatcagcttggttcttttgaccacctgaagaaagacgagcatacaaaacgtacactacaagaattacgataattacaccaagtccgatcgcaattcgtggcaagtaattcttccacaaatttttcttattgtcggtggtttctcgtacttcttcactcttattatcaatcgagttttctacgtactcatctggcttagcttctggtacatcatcgtggtaatcacttaataactccttaccatccaagccaacaacttgtgcatattgacgaataaatgctctaacataaaaatcgcctggaagtttatcaaattcattcttctcaatcgcttcaagatatctgctctgaattttagtagctttttcaatatctgcaattgaaagtcccttagcctctctggcgctctttaatttatctccgatatctgccatatttacctcttcaaattttaatttatcatgttgagtataccataaaattctcattacaacgtcttagttataaaagccatccacctgtaacataaattgtctgtcctgttaaataactactacgtcgatctagcagtgttctaacccagtatgaaatatcactgccattggcccaacgaccaactgggatttcatcttttacctcttgaatcgtatcctcagaaaagaatgcattcattttggttttaaccgcaccaggcgcaattacattaaccgttaagttattggaagcaacttcacgcgcataagcctgagcgaacctggttataccacctttagttgcactatagacgctttctaatgcactacctgcaccaccatagactgagcctaaataaactatacgactaaaatctcgtttcatcagttgtggctctaacaatttagttaacttaattggcacagtaagattaatattaatcagatcagtgatatttgctaatttttcatcacctaaaaaaccatacttagtaattccttgagcaaaaactactgcattaactggcaacaagtttttaacaaaatctgttaactgtgcatcccctgtcgcaaaatccaactgtagcgacataaaatcctggtcaggatgcttagcaaacagctcttgaactaaattttcagctttttgagaattagaatgataatgcaagtataatgaccaaccggcatctgccaaatctcgacaaatatcttgaccaataccgccagttgcaccaaagacaattgctcgcttcaactttatcaaccccttacttgttttctaagtaagcagaacaaagttcactgtctttcataatcttttggcagtagtcataaaactgatcaaaattcattgcctgcaatttagctatattttgtgctaaattttcatgatctaaattttcttcaattaattcaattgccaaataagacagatcattacttgtcctagcagtgcgtgctaaccattctttcttttgcaaaatgaagttttgtctaataaaacggtattccgctgaatttttcttaattggttccgtcaataccctctttatttctgcaattacttcttgagcttgaggacttacaccaaaaatagtagcaaaatcgccctgcctggtgtaattaacagaaatctgcagcgaatccattaacagctgcttttttctcatttcttcaaaccatggtcccattgcacttagttttgattctaacattatttctaacagaatttgagtcaaatcaaagcttgataatactttcttaaagtttttaaagcgaattcctaaaccaaaggaattagaattacctctggctggcaagacttgattatgtaacatgcgaaaactaacttgtttttcagctgtgcttttacctttcccgtgcaaatatttttgctgcagctttcctacttgccgcaaaatcgtttgcacttgattatcagaaaaatcaccgcaagcaacaaattgcatcttttctggcacatacttagcctcataaacttgggtcaagtttttcactgtaacttgattaattgattctttcgtacctacaacttcgatccctagattagaatcaccaaacatatcatgcataatcgcattatttacgctccaagttgggtcatcctgatacatggccaattcttgttcaataatcggagcctcttgcgcgatattttccttagtaaaatacggctgccctaccaattcaaacaagagatcgatcattttaggcgtatgctcaattccactacaataaaacattgtttcattaaaagacgtgaatgcattaacgtcagcaccaatatcttcaaattgcgttgacagatcaccatcttttttggcaaatagcttatgctctaagaaatgagccgaaccggcaaccttttgtggatcactactaccaaagtcaacaattataccgaaaaatcgttgataaaaatgtggctttaaaataatttcggctttaaagcctgactgatattcttttttgataatttttggtgtcatcattttaaaacataactttcattaaagaataaattttgtacgaaagctactaactgcttaggtgtagctctcctaattgcattttcacgatcaaagtctaaatatcccgagaacaattcatcacgcaacatttgacccatctgccagttttgaccgtctagaccaatcttcatattacgcaaaattgcctttttagcctttttaaataaatcatcttctacttcgccctgaactagtttacccatttcggataaaataatttttcgagccgctgcaatcttactaggatcaagtcctgcactgactaaaaacaaagaattattggcaaagcagcttgcttcaacattataagctgctcccaattgctcccgaatttgcgtaaataatttagatgattgatcacctgccaaatattgcgataataatattcccattacttgaccgcgataatcaatactttgttctaaaccaaagcccattaacaattgagcttgcacatttccttgatcatcctctttttcaatcaactttcttttagctggaatagttagactagctgtttgaaatgatttagttaaaccagtttgttgaaacatagcctgagctaatttagaaaccagattattatccctggtcattcctaaaatttgcattggtacattagctaaattacgccaataatgcatcatagtcgtgctagtcgcagctttgatttcatctagtgagccaataaatgtctccgcataatcaggttgatcctgataccacaatttaaaaaactgctccaacgcataattagatggttgttcaatcagttcttgatattcttctgctaattgacgtttagcatattccaccaaaggttctgcaaaattaggttgattaactatttgtgcaatcacattaagaatttcttcatacgtataatgtggatccaaaatctcaatcggctcaacaaaattggcataataagtcaaaagtatttctttaccaaaaacttgtggcataatctccagctgtaaatcatataattctgccaatcttttttgttgtaaagcaagtgacggataacttaagctgctattcatctgtattcgcgctagcaaactagcataagctaaattatgtttagtcagcggcaaacgcaaaaaacagccaatagcggctgttgtaaactttttattttttctaattgcaatattagttgtgagcattgtttgaattaccttcattctttattggtggcactaaaacttgtcgtggcttagagccttcagatggaccaacaatccctttagcttccatttcatcaacaattctagcagcacgattataaccaattctaaacctacgctgcaacattgacacgctggccgtctgttgacgtcgtactaaatcaacagcttgctcatagaattcatctgctggctcatcatctttactatcagcatttgatgaattttcaccttttttaggaatcattgtctcatcataactaacctcttgttgcttcttaacccattcaattacgcgttcaacttcatcactagcaatataagcaccttgaacacgttcaggtttagatgccccaattggcatataaagcatatcaccacgaccaagtaatttttctgcacctgtttgatccaaaatagtccttgaatccactccacttgatacagcaaaggaaattctcgatggtacatttgctttaatcaaaccggtaataacatcaacacttggacgctgagttgccaaaatcatatgaattccggcagcacgtgccatttgtcctaaacgaacaatcgcgccttcaacatcgtgaccaccaaccatcatcaaatcactaagttcgtcaactacaactagaatataaggtaacggcttcatcactggtttagttttatcacgattgttttcagcaactttttgattatattcactcatgtttcgcacgccaccagccgcaaatagcttatatctgcgctccatttctttaacaactttgcgcagtgcatttgcggctagcttagcatcggtcaccacagggatcaataaatgcggcacaccattataaactgaaagttcgaccatctttgggtcaattaaaactaatttaacttcttcaggccgcgccttcattaaaatactggctaaaattgtattaatcgctacggacttaccagaaccagttgaaccagcaatcaataggtgtggcatcttagctaagttggcagaaataatgcttccagttacatctttacccaatggtacatccatcggatcgcttttggctttattatcttgatgttccatcacgtctttgaatgaaacaacagacgttgctcggttaggtacctcaattccgataaagggcttaccaggaattggtgcttcaattcgaatatctttagccgcaagcgccaaagccaaatcatccgctaagtttacaattcgacttaccttaacgccaacagctggctggacttcataacgcgtaatagttggtcctaaaatagcttttttaataatcaccttaacgccaaaactcttaaacgttgattgcaaaacttgggtatttttcttaattaaatcacggtcagtactctgatcagtcgatttaattggatcaagtaagcttaaaggtggcatcttataagctttattgactggcgcatcagtttttagttcaccatgatcgacatcggctaattcctgctttaacttttgatcatcttccgcaaaagaatgtgacttaggtagttcctttaccccgtcatcatgttgtggtgcaatttgaatttgcggttctggatcaggtgtggtctctggctcaacttctacgtcttcagccgtcggcgttacatcgtcatcagttggatcggcagggtcaaagtctgctacattaggaaaaatcggtttatcgtcatcaactaaatcttcgtcttgttcctcttttttctgacgccgcttttccaaaacgtcattatatttatctttgacctttaccccagcttctttattctttttgatgaataattgactaactgtctggaatttttcgataattgttctaaatttaacatcaaaaaacatcaaaattccaattggcagcaataaaatagcaaaaacacggacaccgatttgccctagtagtggataaaaaagttgataagctaatgaaccaattaatccaccaccaatgctctcagtgactccagcacgaccaaactccgcggccattgcatgccaaaaagaattcaggaaattactgttaactaattcatgttcaaaatacaagttacattgaattaacagaattcccaaaaaagcgattgctaaccccaagctacgcttaattgttaagtgaatcggttgattatagattaaatttactaggccaaaaagtcccagtaaacctgccgcaaacaaataagaatccccgaagaacattcgaatcaaatttgcgatttgcttacccaaaataccgaaacggacaaaagccagccccgctattaaaatcaagactaaaccacaaatactccaattaagattttgctttttgtttgcttttcgcttattgtagctctttttggcctttctttgtttcttttttgcaggcatgtactcacctgattaattatcgaattcagccttgaagttcaagttaaccggctgacccaaagttaattgggttgtttcatagatcaaggtctcaagttgctcaactaatggtcgagttagtaactgccaatctgaattactaatgtcagagccatcaccatggtaatcttttaattgcacgatttgatgaatcaagccgcttgcttcaaacatagctggtgcaggaattacatcatattgaatagcaacatcatagtaactaccattttcttctgaatgctcatcgtcaccgctaacatctaattttctaattcctggtctaacgtcactaattggtttggtatcttcatcaactaaatcataatgaaatgcctgtacgataatatctgtctgtttttcaaaatccattatttattctcccctagattacgttcatatctttcaggacgatcatagtcatcttttaacttgtcattttcataatgatgggttgtttccatattaggaaaaccttgctggcgtaaagcttctagcaaaaccattgctacagaattagacaagttataacaccgaatgttatcagacattgggatacgtaaattacggtcatagtattcacgcataaaagtttctggcaaaccagttgtttctttaccaaaaacaaagtaataattcttgttaggatcagtataatcgacttgtgcataattttttgatgagaatttagaaattaaatacatctcatcattaggccctaaagtcttcaaaaaggcattcaagtcatcatgtctgcgtacatcgaccttatcccaataatcaagacctgctcgcttcatttttttattatcgatttgaaaaccaagtggttcaatcaaatcaaggacagtgttagtccccgcacaagtacgagcaatattgccagtattagctggcatcaatggttcatacaaaactacatgattagtcattcaaaaaactccttatcaaaaaaagcgtagcttttaagccacgctttaaaactatctagtatttattcgctttcgtcatgatctgcatcccccgtggtcgaagaaacagcattctcttcaaagagtttagactctcttcgataataattgtacacgcgagacacaataatcttcaagatcgcataaattggaataccgaaaactacaccccataagccccagacggcactagcaccaatcaagagtaaaattgttgtaattgggtgcatttccattttattccccattacccatgggctaagaattcttgattcaattgtttgttcaatagcaaaaacaattaagaccttaattaacattgaacctgaagtcataattgaaattacaattacaggaatcattgctaatggtgtaccaaagtatgggattaagttcataaacccagctaaaattgccaaagccacgccatatggtaaaccaattagaatgtaacccaatgagaacatcacacctacccaaaaggcaacagtaatttgaccacggacatatgaagcaacagcatagttaatatcatataataatttgctaaaactaggttgccatttttcaggtgcaaacttggtaatatatggccgcagttgatgaccatcttttaacatgaagaataaaataaacggtgcagttaacaaagtcatagccaccattgtaataatgctgacggcagatgaaatattgccgatagttgcattgatggtactttgtccagacttaaataaggtcttctgcgtattatcaatcatgcctttgatactgcctttaaatgaatgtaaacgcggatcttgcaacgcattttgtgttgcattaaccgcatcattccaaatatgaggccagttctttatcaatgaattaatctgattctgtgcaattggaaccaagatattaataatccaaattaatgcgacaactactagtaagaataaaactataattgtcaccactcgcggaatcttaaattttctttcacaccaatcaacaaccggattcatgatatagtactgaattaccgctaataataatggcggtaaaattgcactaaagaagatccaggcaggattcaatacaaaagatactttattaaagacccaaataattaaaaagaatagcaggacgtttaataaaacaatactaaaacgattatctaagaaccattttttaaaaacagttccacccctatgttggttattttccatctattcatcctaatttttaaatgtgttcataaacaatatcatcatcaaccttaaaattaggtaatggttgatcaatatccggatcaaagtagatcgcattagcaagtggcgtcttagaaacgggacggttaaagaacaaggttgcgtgtcccaatgccttcatgttgctctctaccatcggaccaacatagtttgcaacataggtttgaccatcaacagtgattgtatcgccttttttaaaaacaaaaccactaactggcgtctcagtactgaatttttgaatgacagaaacgtcttccaaatccttattagcaccctcgccaaataaaattaccatgccatctttattatcgacggcctttttaccaatttttttaatatttgcaatccatttcataatataatctctccttaaaaataattttagcataagaaaagctgcttaaaaacttaagcagcccaaaatcggcgattattttttgctcaacaggaaatcgtgtttttaagcgtctaatccgctttcatgctatactttattttagacttatttttatttagagatggaggcccacacatatgaaggttttaatcggaggttacaccaaaaaaacttccaaagggatttatgaattacctattaccagtgcagcaaatgatgcccgtttaggcaaagctgagaatattattagcgttggtggtccaacttatttccgaaaagatggtaatttaatttttactgttaataacgctggcgataaaggtggaatcagcgtctttcaattaagtgatcaaggcgcaaacgaagttgaccactatttaactccaggctcttcgccagcttatgtaggaattaaccgcaccaaaaagttgatttacactgctaactatcatactgctgtcttgtccgttttccgctacaacgacagtggcaagctcgatctagttgatactgtaactcacaaagctgaaacgttgggtccgcgtcctgaacaagttgacggtcctcaccctcacttctttgatgaaaccccagctggtaacttggttagttgtgatctaggcaatgataccgttgatttttatagattagaaaatgatcaattaaaacacattgctcaatataagtgcgaaactggctttggtacacgtcatatcgtcttcagtaaagatggcaattacttctacgttgtcggtgaactttctagtcaaatcaatgtcgttaaatttaacgaagacacttgggactttgaaaatattgctacttataagacaattcccgctgattttactgaccataacggagctgctgccttatatattagtcaagatggcaaatatgtttacacttccaacaggggacataattcaattgctgtcttcaaagttaacgacgatcatactttgagcctggttcaacgtgtatccacttttggtgacttccctcgtgattttaattgggataaagatcagcgctacgtcgttgtcgctaatcaaaatacagataatgctactctttacacaagaaacgctggtactggtagcctaactcctattcaaaaagaaatttccgtaccagaaggcactcgcgttcttttcaccaaatagtaattagcattagtaccaaagtcatggcgcaatagaacgtcatggcttttttattcctacaacttaaagtaaaatagaaataaatgaaacaaaatataagtcatgtggtaataagtcaaatgaaaggcgatgatatttgttctttttgatcataaatttgagtatatgaaactaagccttggtaaaggttgatttttttaatgttaaacttttgtttacttttaaatttagaccaatttttgaaattaagacctcggtgtcctgtacagtttgtcatctttgagcaatttaaagataactcgtactaattttcttgcagttaatgtgcaagcacgtttatgcggcgagtagacagcttcatcatacttcttttggtaatattttttgaaaacaggatcatgtaatcttgctagattggcagcttcaatcaagtaatatcttagatatctgtttccagtcctggccattggagtatgttcgttgctgtgatctcccgattgatattgattccaggttaggccggcatacttagccagctgttcttctttatcaaagcgatcgatacttccgatctcagcgataataccagctgtataggttttgccaataccgggaattgattccagaattttgctttctggtaatgcatcaacgatacgatcaattgctttttctagatctttaatagattcattaaagctttgaatcatgttgtaatgaacagaaagcactgcatcaattgaatcagtcattactttgcctaagcgatatgaacctctaacagctttcttaattgctttagccaaggtatctggatcggaaaagcgtcctctgcctttaacctgtaagtaagaaattaagtcttcggtaggcatatccgcgatctcatccagagttttactatcggttacaatagacatcattgtagcaccgaaaagaggagtattaatcttatctttatcgacagtgattagtttattaacccgataatataaagcttcaatgaagtgctgtttggtacgagtcagttcttgaactaattcatatctggtacgcgttaaacgctctaaagcaagatagttgtcttgtctggcaatgcttactcgataatgtccaaagcttagatacaaagcaatgtaataagcatcgagaggatcagttttactttcttcaaagactttatgaaacctgctggtttctttggggttaattacatcagtctctacattgagcttttgtaaatcttcgtcattttggaaaaagtaagcaggatgaaaactgtaaatagatgtagcttccatgccaataatgatttgatcatagtgtttattttgagctagatctaaaatttgttttttcagttcactagcaccataaagatcattgacaaagctatcgttaattaagcgtttgttttgatcttctgaatcaagtgcaacgacctgtaaatctttagaactaacatcaataccgacaaataatttcattggaaatggcctcctttctttcaaatttctgatcatagattttgatcttcacatgttaacccctaattacagttcttaagttcaatctcgccagtataagtattcactggttgcttctttgaaagctgcacctaatcccaattgctcaaggactagcaaaaagaagcaatcaatacagcatgtgagttagagcataaaggaactgtctgggtggcagacttataaagcagacaaaactgcaggaggtgataacctagaccagttgaccaaagccaatgacaattagaggctaacatgtgaagatcaaaaagcaaatactaatttgattaattatcacaatatgactaattacaatttatataatacgagaaggtgacaaagtgaaaagaaaaataattcgaatattacttttcattcttggcgggatattagggttactacttctgtataaactctatttaaattaccgtcctgaattgaatttattacttcattttgatcaccataatgaagaagtactcgttaacatggtccgtagccatggtattgaagacttagcctttttatttttacttaatgcgatctgtgtagcaattcctggcttatccaacggaatcttttgtgttctcaacggaatcctttatggccctgcctggggatttattgttaattggatcagtgacattttaggccaaataattttaatggaacttttgcaaaaactctatgacatgaaaaagatgtctaacagtaaagtttataagttattgactggattaaaatcaccaatgcttggattaattattggatatatgattccatttattccgagtgcgacagttagctatgtcaacattatgattaataaggagcaacgtaaaaaacagctaataccaatcattatcggtgtcatccccttcgcttacttatatgcttatggtggcgattcaatcttgcacttagacggaacacgattgattaaagttgtaatctcattcgttgtcattgctttaattgcagtagctattttgcttagtctgagagcaatcaaaaagcgtacaaaaaaagcttgaatttactcaagcttttttattatgcctagcatatttaaactgagttagcttcttctaacagttcttcgacccaagttctcttgattttcttcatccctgttttgagagctaacttctcaggtaatggcatctcttgatcaactaatttcttcttgtcagacatgtagtacatcgcacgaagcaattgacgaatatcataaattgagtcaaatacttcaggtacaccacggtcaacgttaagcaatgtataaacagcttccatggcagttctgacagaatattcggtggtaaagacagtgtctctagttggtgattcggcaaaattgccaataaaggcaatattaactgatccttctggaacaacatctggacggtccccatcatgacgaggcataaagtaactagtgatatatggcatgtaaactggtacggtattcatattttcttcactagccaattcgctgatttgactctctggcacgcctaagtgatagagcatttcctcggcaatttctttaccagtacagtcaacgactctcttcttgatgtaattaccctcagtatcagaatacaaagcataaatccaaacaacgatttgatctggattctggctcttaaagtgaggttgacggtgaatagtaaagctaagttcccaattagagtcaacaacagtgataattccaccagtattaactttaccatcgtaaaggctgcgcttagtcaagcgttcaaagtatggagctattttcttattttccaaggtagctgtagctgatacgaaccaactacgctctggcaagttttcacagaagacatctggatgaccaaagtcaggatcttgtttagccaaattttcccataatttccatgaagagcccttgtcgtgagtaattggtgctggggtattttgatcaccataagtagaactttcagtgattgaaccgttagtcacaaagacaatatcatctggggttaaatcaatatcactttgctcaccattcttggtcatcacgatcttcttggcaaccttttgcttgccctcatgatcaacaaccacgttatcaacgtgacaatcatattcaaattgaacaccgtgatcttttaaatatgccaaaagtggcttaaccatggactcatattggttatacttgttaaacttcaatgcggtaaagtcaggcaaaccatcaatatggtgaataaagcgcattgcataacgccgcatttcggctgctgagtgccatttttcaaaggcaaacattgttgcccagtatgtccagaaattagtcttaaagaagtcatcactgaagaattcttcaattgtttcaccttggagttccttttccggtgtcatgattaacttcacgatttcattagcgcacttacctagaccatattgaccatcacttggtaagcgatcaccgcgattataaattagacggcaattggatgagttaggatcttctttatcaagccaataatattcatctaagtatgatgcgccagggatttccaaacttggaatcgatctgtacatatcccacaaacattcaaagtggttctccatttcgcggccgccccgaaccacgaaacctgcattaggacgcttagcaccatcaagtgaaccaccagctacgggtagctcttctaagatatgaatattttcacccttcatttgtgcatcacgaactaaaaagacagctgcagaaagaccggctaaaccactaccaataatataagcagattttttatctacgcctgcgggcttttttgcatccgcaaaagcctcataattaccattggaatagtacataaagatatcctcttttctgtataagtatagtttttaacattacactttaattataaagaaagcggttactagatgcgagttttttagaagttttagctaataactttagaattctttattaattagtttctgccacagttcttgcatatcttttggatcattcaactcaattgttttacatttttgttggctaaatggatccggaaaatttaaataaaagcaatttaaggcttggcgtgaaaacccatcttgaattccatataaaggatcaccatataaggggtgtcccagataagccatgtgaacacggatctgatgggttctaccggtaagcaagcgtaactctaccaagctagcacctgtaacctgatctaggactcgatacgcggtttgagcgtcctttccatctgccactaccgcacgtttaaccccactaccctttttgccaatcggttgatcaattaaaccagttaactcattcggagcaaaattgccatgtacaattgcatgatattttttgacaaatttctccttgccaattttactaaaacgagcatgggaaattgcatttttccccaccaatactaaaccagatgtatatcgatctaatctagtaataacatgcggcttcaaatttttctgtcctttttgggcaaaataacccaacaatcgattgaccaccgcatcatcatcttcatagcgtgagggaattgacaacacacctgcaggtttgttaactacaagataatttttattctccaacacaattgatactggattattcgatggctttaaaaaatcatttttcttttcttcaccactgataaaaatcacttcatccccagcacgcaaattaaagctagtatatcttcttttatgatttactaaaatcatgccatgatggtgtttagcattgtttaacgcttgatgcgaaaaaccattttttaacaaaaaaggacccagctttttggggtctctttcttgcacaattagtttaaataaactagtcatttttttcattatctccaataaacgcattttgtacgcgtgaccaaaaatgatggtggccaaattgatcaaactgaatcgaatgccgcgaaattcgatattcaatcttcttagcattacgtacatcaattcttgctccatcaactgtcatcacaaaatgatctgcattaggaacaatcgaaatccattgatcaggcgcaatcacaattggtgatgacaaagttctaaaaactcgattattaattgaggcaatttcagtcatttgcaacgcttttagccggggatgaattactgcaccacctagtgatttgccataagcagtcgaacctgttggtgttgaaacgcaaagaccatcgcctcgaaagttttcaaataattgatcattaatgtacacatcggcctctaatgtatgtgaaactcttttaactgctgattcattgacggctaaatggtaatgagtttcacctgattcagtgagcatctttatttctagtaaaggatacttcgctggttcacccttggttactgctaaagcatcaaccattttttcaatatcatagttacgccaatcagtataaaaacctaagtggccagtatgaatcccaataaagcgcacagaatctacttgattttcatagcggtggaaggcattgatgagggtgccatcaccgccaacagtgatcactacatcaggatatctagcatcaaagataaagcccttttcctgaagcagcttcttaagctgcgcaactgtctttaacgtttcatcgtagttattatgcgctattgttactttcataatttttctttgcccttatttttggtaaaaattttctgagcttcttggacctcatccttaattgacgacatttcttcgtctagtctataagcggcttcagccgttgattttaatctagctgaaatgtcatcaggatagacaccttgatatttgtaatttaaagtatgttcgacagtagcccaaaagttcattgccatagttctaatctgaacttccgcaattaattttttcggaccttctggtaagtaaaccgtatagttaatcaccatgtggtatgaccgatatccactcggcttagcattttgaatataatcacgctcctcaacaacttccatatcatctcgagcatgaatcaaatctactaccttataaatatcgtctacaaattgagtaacaatcctaatccctgcaatatcttgcatatcagtctcaatgacatcaggactaattactcgccgtttcattttttcctttatagaatcaactgtctttacccggccaattacaaattcaataggtgaatgttctcccttagttaaaaagccttgtctaagggaacgaaatttaacctttaactcgcgaacagcttcgttataaggccacaagaagttatcccaatctaattccatgagaaaacattcctttcttaagcaaacaaactcattttaccatataattaagttaaacagttcggaggaaaaacagatgagtaaaaatcgagaaattgaagcaaaaattcttttaaataaaagcgtttatgatcagatcactgccgcttttccaatcaaaagtgactttacccaagaaaattattattttgatacagcagatgatttattaaaaaatcatcaaattagcttgcgtattcgaatctatgctactcacgcagagcaaacaatgaaggtaccggatcctaatcctgtacaaaagaatttccatgaagtaattgaaattaatgataaattaactcacgctcaagctaaaaaattagtagcaaaaaagcattttaaattcactggtaatattggcgcatatctagataatcattttgccaatgaccaaaaaaagctacatcttttcacctggagcaaaacccgcagaattttgatgaacgggccacaaaactgtgaattaactctagatgctacgtcttatccagataactatcaagattttgaattagaaatcgaaaatactaatcctgctttaattcaaacagtattaactaaacttgaacaagaatatgactttgaacaaacggctgctaacactaatcaaagcaaaatagctcgtgcaagcgctcaccaaaaatagtatatagaaaataaggcatattttttgtcacttattttttttcttgctaaagtaactaatagtaaatcaccaaagaggtcgagattatgtttgagatttttctattcatcaatccaatagggatttattgttatgacactgaaaaacagattcgtaaaaccgttgatgaattaggggtcgacgtttgttatcactatattcccattgcaaatgtttgtttaatcaatgatgatgcgattcgccgacgcaaagatgaccagaagttgcctgatattagtaatttttctagagcaacttatgaagcattagaaaattaccacgcgattaggctggcctatggcaacaaaaaagcccgtcaatacctgtatgaattacaaaaaaacttgagcaaagatgcttcagcttatacacctgagctgcttaagcggatcgcaaacaaattacatatcaaggatgcggatattcaggcaatcaaacaaactgattacctgcgtacttctattgaagaagatcaaaaactagccaaccaatggaatattaaagctactcctaccaccgttatctttaacgaagacaacgagcaaaatggagtattgctagagggaccaatcaatcaacaggatttagttaatctaatgcttccagattgtcaaaagtgtttttcagactatttacctgcggagcatcatttacgccttatctaaaggcgttttatttttgcaaaaaatcactaacccgatctctttcacctgggttacgccaagtagcaaaaactttatcaggtaaatcatcaagagttaatttgcgttcataaagcatctctcctattttcaatcctaacttttttttgcataatttgctggcgtaaatattttctttgagttgcaatgttcaaagaatattcttttttgaatggcttaaagcgccaaaaatcttttatccccaattcatcaaggacaaatgatttactttgataaaccaatttattagctaccggttcttcgaaaacattatattttaagcaaaaacgatttctctgtggattaatttctaaatagtaattcccccaagctttattttgtcgaaagaaaatcaactgtgtgcgtttcaatcgccgtttcaaatagtgtcgctgtcccacaatccaaatatcttttacaccaattttttgataaagctgatgccgatggttaaattcttgttgactcaacggcgcacattgaacttcaaacgctaacttagcagttgctaagacatctgcacgcaattgtccttcagctaatggaatctcaacttctgccggaaaaccagctgccgtcaaagctgacttcaacagcattttcgattggtgatgctcctctttttcacccattaagttactgtacttcacaagatgcttaaaaaaggctgctttttgctccgacataaccaaaattacttttttattgcaatgtggacagtgataattatcacgattcaatttcttttgccttgcattaactaaacatgcttcgtcaactgcaaggactaatttcttatttaacatggctgcatacatttttctcacccatgttttattacgtaaaaaagagacggaattttgtcccgtctctttttctttaaagaatcttaataattagctgcttttaaaaagtaatgtcgaatctggcctaaagcattttgcatcaataagcatttgcctgtttcttcaactacacgcatcttatcactatcgaccttaaaaccaaattcgttggctattgtccacgcatctgctggtttaagctcctcatattcttcatcaagaaatgccaaatttaagaaatattgtccatgcaagtaatacaagctagaagctaaatcatttgccttaaggttatcagctaattcaattagactacctaaatcatcaaaatagtaagcctgagtcttgcgcgatctccaatcagttggctcattgtttttatcatcttggttaaaaaagttgtgagtagctggtccttgaggagccgaatttgaattcgtactctcctcatctaaatcaaagaaactttttgaatcatccgaattcgttgatgattgctcatccttaggaaagctatcacccattagtttccttaaattctgtgcatcgtccggcttaactttggtgatcatcaaatctaatcccccattattaggcattacttgaaatgatactggatcaccattggcaaattcatggtcttcatcgacctcatcaagaattttatagaagaagtcttgaatcttttgtctattacctaataaatcaagcattcccatcccacgacgagccaattcagctttatcaattcgaactctgatagtattcttatcaatatgatctacctgcacaggatctcacctccatgaattaatatatctattgtagcgtatttttcgtttaaaataaaagtgttagtctcaacaaaagccttaactaacacttttcaatcattttataaatctgcaatcttttgtgcttcagccaattccaaccgacgaacttttcgtggcaagaatcgacgaatttcatcttcattgtaaccaacttgaagtcgacgatcatccataatgattggtcttcttaacaagctaggattcttttctactaaatcaagtaactgatcaattgataaatcgtctaaattgattcgcaattgttgaaaagctcttgagcgggtagaaatgatttcctcagtaccattttcagtcatccgcaagatctttaataattcttttttagtcaatggttcagaaaaaatgtttctttccttgaatggaatattatgtttttcaagccacgctcttgccttgcgacatgaagtacaactaggagagacatataaatctaccataaaaatcacgctcctcagaacaaatatttgtatacgtttctttactcatagctagtataccatataagcttctttttcgtaagtgcttaatttatcgtttacctctgctatttacttaatactaaagataaaacgtgaattatttgtgaagatttcgttcgttttgtttaaaattattaaaaataaaaaaagagacatcacagtctctttttgcaaattaaaactacttgttcaattttttcattaaattattaactaatttttcgttgtcttcagcagtttctgatacataacaagcttcgttagctaattctttaatgtcagcagtgttcaatttcttcattaagcttctgatacgcaaaattgaagttgcactcattgagtattcatcaagtcccattgaaagtaagattgggaacatagtgttatcaccagcagcttcaccacacataccacaccaaataccgttttcatgagcaccatcaatagtgtgcttaatcaaacgaagtactgatgggttatatggttggtacaagtatgacacattatcattaccacggtcagcagccatagtatattgaattaagtcattagtaccaattgagaagaagtcaacttcctttgcaaattgatcagctaaaacggctgcagcaggtacttcaatcatcataccgacttgcaagtcatcaccaatcttaacgccttctttagcgagcttatctttttcttcagctaaaatttgcttagcttcacgtaattctgctaaagtaccgatcattgggaacataattcctaatggaccgtatgcagatgcacgaagtaaagctcttaattgagttctaaagatatccttgtattgcatagaaagacggatagcacgaacacctaagaatgggttcatttcttctggaagatcccagtaatcaaggtgcttgtcaccaccgatatcacaggttctgataatggtttgtttaccattcataccttcaataacttccttgtaggcatcaaattgagcttcttcagttggaaagtcactagagtccatgtacaagaactctgttctgtacaaaccaatggcttccgcaccattatcctttacacctggcatatcattaggtgtaccaatgttagcagcaatgataaatttcttgccatctgcagtaactgatggttcattcttaagcttagcccattctgccttttgcttaaggaatgcttcactcttttgcttgtaatcagctacttgagcgtcacttggatcaataattgcatccccgtcaagaccatcagcaattaacatatcgccgttcttaacatccttagtaattgagtcagtaccaacaacagctggcaattcaagtgaacgagccataatagctgagtgagctgtacgaccaccaatatcagtaacaaaacccttaacatactttttgttaagttgagcagtgtcacttggagttaagtcgtgagctacaacaattacttcatgatcgattgaagcaggatttggtaattccttaccaagaaggtgagccataatacgctttgaaacatcacgtacgtcagcagcacgttcttgcatgtaaggattatctgtcatcccttcaaaaatagcaataaacttcttagcagtctcatcaagagcagcttctgcgttgatctttgaatccttaatttcattctcaatggcaccagtaaattctgggtcatttaaaatcattaagtgtgcttcaaaaacttgagcttcttcatcgcccaagctttctttagcaatatcatgaatcttttcaacttcagcagttgaagtcttaattgcatcgttgtaacgagctacttcagcttcaacatcagcaattgaagatttagagaatgaaagatcaggctccacaagaagatatgctggagcaatagcgataccatcacttgcagcaattccttttaaagtcttggtcattattcagctaaaccttcttttttcatagtgtcggcaattgcgtccaatgcgtccttttcgtcatcaccttcagcagtgatagtaacatcagcattttgaccaacaccaagtgacataacacccatgattgacttcaagtttactgacttaccgttgtattccaagttaacatctgagccaaactttgaagcagcttgtactaaaagagtagctggacgtgcatgaatacctgtttctgcaatgatatgaaaatcgcgtttttccattataaatatctcctttaaattgaaaaattaaactggtaataaatacccattcgagtattagattatcatgtttttacagattagacaactgcaatgtaacagtttacattatttattcatcggtattcgtagcggtatacacaatcgcgccgcctctttctgccctaccggtaatatattgtctttttccataatttctaatagtcttttgaagatcaaacgcatcttttggctcaactttatactcttttatctcacctgagactaattgatctagaattttctgataatccaaaaatatcaccacttttttaaaattttataatttttccactattaattctactatttatattcaattttcaaaaatattaatattttgtttgcggtaacaaaaacatttcttacaaaaaataagtgtttgagtcttagcacttgactaccaagagtgctaataatataattttggtacagttgaaaagaaaggcggtactatattttgctttgccaaaattgtcatgagcggcccgcttctattcaccttttcactaaggttaatggccaaagccacgaaatagatttatgtcaacactgttatcaagaattaaaaaatcaacaaggaaatcaaggaaaaatgaataataatgaattttttggcgactttgatgatttattcaacgcattaaacggaaataacaacaatgccgcaaacaataataatgaaatgagaaataacgaccctagaatgcaaatggggggaggcgctggtaatggtggtcaaaacggcagaagcctacttgaccaatacggaacagacttaactgcccttgctaaaaaaggcaaaattgacccagtaatcggtcgtgataaagagattgctcgggttatcgaaattttaaatagaagaactaagaacaaccctgttttaatcggtgaagcaggtgttggtaagactgccgttgtcgaaggcttagctcaagaaatcgtagatggatcagtaccagcaaaattgcagaacaaacgaattatttcattaaatgttgtttcacttgttcaaggtaccggtattcgtggtcaatttgaacaaagaatggaacaattaattaaagaattacaacaaaacgacgatatcattctttttattgatgaaattcacgaaatcgttggtgccggtaatgctgaaggtggcatggatgccggtaacattattaagccagctttggctcgtggcgaattgcaattagttggtgctactaccatcaaagaataccgcgatattgaaaaagactctgctttagctagacgttttcaaccagttgaagttaaagaaccttcaattgacgaaacaattcgcatcttaaaaggtattcaaaaacgctacgaagactatcaccatgttcactacactgatgaagccattgaagctgccgcaaaactttcagcacgttatattcaagatagatttttaccagacaaggctattgaccttcttgatgaagcaggttctagaatgaacttaaccattccttatattgataaggataaaatgcaagaaagaattaatgccgcagagcaattgaaggaagaagccttaaaaaacgaagattacgaaaaagcagcctactaccgtgatcaaattgaaaaatatgaaaaggttaaagatcaaaaggtagatcctgacaagtcccctgttattactgataagatcatggacaagatcgtagaagaaaaaacagggattcctgttggtgatattcaaaagcaagaagaaaaccaactgcaaaatctagctgctgatttaaaggctcacgttatcggccaagacaaggctgttgaaaaagtagctcgtgccattcgtcgtaaccgaatcggtttcaacaagtcaggccgtccaattggttcattcctcttcgttggtccaactggtgtcggtaaaactgagttagctaagcaactggctaagcaaatgtttggctcagaagatgcaatgattcgtttcgatatgtctgaatacatggaacaatactcagtttccaaattaattggttctgctccaggttacgtaggctacgaagaagctggtcaattaactgaacaagttagacacaacccatatagtttgatcttgcttgatgaaattgaaaaagctcacccagatgttttgaacctcttcttgcaaattcttgacgatggtcgtttaactgactcacaaggtagaacagtttcattcaaggataccatcattattatgacttctaatgcaggacaaggcattaagaacgctagcgttggctttacagcagaaaacgaagatgaagctaatgaatctgctagaaataatatgagccaattctttaagccagaattcttgaaccgtcttgatgatgtaatcgaatttaatgaattgactaagccagacttgcttaagattgttgacttaatgttgcaaaataccaacaatatggttaaggatcaaggcctacacattgatgtaactgctgctgcaaaagataaattagttgaagatggctttaatcctgccttaggtgctcgtcctcttcgtcgtaccatccaagaagagattgaggataatgtggctgatttcaaacttgatcatgcacaggctaagaatttaaaagccgatgttgttgatggtaaaattgtaatcagtgatgaagcaaataatgaataggatttaataaaagacaaagtccaagttataccaaaagatttcgaagcaatattagaaatcttttttcttaaaaataaaaatatgctactcaatttgaggtatactaaattagaagaagtaaagctaacagaaacaggtgaattccatgcatttaattgatgtaaccaataattactctgatttggttcacagtcagctcaacactaccgatgcaaactatgttaaagtttattctcttggtaatacttcagttatttatactgaaagtaaggattctatcggtattgtacttgaaaaccatgaccgtcgtgttcgcgaagatgagattgaattcgtaatcaagcgtttaattaaagattatgattcttcatacactttgactgtagacaagagtcgtcatgtaatcgaaattcacgttgacaagtaatccaaatattgttgtatcaaaaaaggaggattgattcattcaattctcctttttctttttgctttaaagtttttctgttaattcaacatctggatatttgtcatggaagaaacgttccgcaaattcattttcaaataagaataatggattaccataacggtccttaactaataagttacgagtattagacatgcgtgggtcaagctgttccggatcaatccagcgcgcaacacgatgaccaatactgttcatttcaacttcagaattatattcattcttcattctgaattggaacacttcaaactgcaattgaccaacagcaccaagaatatactcatccgtttgataattgcggtaaagctgaattgcaccttcttggactagctggttcatacccttatggaatgatttttgcttcatcacgttcttagcagttactcgcataaataattcaggtgtaaattctggtaatggtggataaacaatcttgcgcttaccagcataaatactgtcaccaatttgaaaattaccagtatcgtataagccaactatatcgccagctaccgcatcagaaacttgtactcgctcgcttgacatgaattcagtcgcattatttaaacgaattggcttatcagttctagctaaagttacatccaagcctttcttgaattcaccagaaccgactctaacaaaggcgattcggtcacggtgatgaggattcatattagcctgaatcttgaagacaaagcctgaaaattctggatcttctggacttagctcctcatccccattaactgtgtgactctctggtgctggagccaaatcaacaaagctgttcaagaatgtctcaaccccaaaattggtcaaagctgagccaaagaagacaggagtttgatcacccatagcaatcttctcgcggtcaaacttgttcccagcttctttaatcaaatcaatttcatccagagtatcctggaattgaggatcttgactaagtggctcactatcaggcaacttaccatcttgatctaatggtaaaaagcgatcttgatcatttttgcggtaaagctcaacacgattattagcgatgtcatatagaccctttaaagtttgacctgaaccaattggccagtccattgctacaccctcgataccaagcaaatcttccaattccgcaattaaatctaatggtggacgtccatcacgatcaagcttgttcataaacgtgaaaattggaataccacgttgcttaacaaccttaaacaacttctttgtctgtggctcgatacctttagcagagtcaattaccatgacagctgagtcaacggccattaatgtacggtaagtatcttctgagaagtcctggtgtcctggcgtatccaaaatattgatacgcttgcctcgatattcaaactgcataaccgaactagtaacagaaatcccacgcttcttttcgatttccatccagtcactagtagcaaaattgccagttttacgtgccttaaccgtacctgctttacgaattaccccaccaaacaaaagcatttgttcagtaatcgttgtcttacctgcatcggggtgagaaataattgcaaatgttcttctcttttttactttatctgctaactctttgtccattagtcctcgctatcttcttccttttttgattcatcaatcgttaataataccgtcaacaagcgtgaccccttcatccttctagtggtcaaagtcatcccatcaccaatatcaactgttaacttttctcccttagctggaatcacttttaaagtattgatcacatagcctgctatcgtatcaacatcttccatttgaagattagtaccaaattgctcattaaaatcatctaatggcatcttaccgtaaataatgtacttatttggagctatttgattaaaaagaatctcagtgtgatcaacctcatcatcaatatcgcccacaatctcttcaaccaaatcttcaattgtagctaatccagttacaccgccatattcatctgtcaaaattgctaattgtcgttgcgtttgctgcatttccatcaacaaatcgcccagctcggcagtttctggtgcaaacagcggctcagtcatgacatctttatagtcaagattatcaaaacccttttgtttagcctttcgtaaaaccgttctgatatgaataatccctacaatcttatccttatcacgttgataaacgggaattctagaatatggctcacgaaggatttcatctagattgtcttgaaaactgacttctcgatcaaccatgaaagcatctgttctaggtaccattacttcacgggctgtcttaccctgaaagtccaaaataccttctagcattgaaaattctgtatcatcaattttatgactttcatgtaaagtaacaatttctttttctaaatgatctttagtccccacttttttatcgccggataatctattttttaagcgaccaaacagagttcccgctccaggatcactattcattttcgtactctctttcttaaaaaagttatctaaatatagctattatagcatagagccaataacaattatgttaaaatagcacataagactaggaggttcgtcatgaaaaaaagtcatgtcttactcgtttttacatttcttttgctaattccctatatctgtagcttagctattattggaatcggctataatgcattagttttacattcagctgaactttatcgcacattaatcggctcattagttggcgcaatcattatgtttgctgtcaaggctactattcaacggcctgttgatttattagctgttcaaaccaacgatggcttactgaagcagcttttacgtttcttcagtatcagacgacgctactggcttttagcagctaatattatcttagactttgttctttgctttgctgctacctacataatacgtgctcttttaacacttgatcaaatcgtaggcagctccatcggctttgttttgttaatcatgtttgtttcaacttgtcttggcgcttatgttgaatacgataacctgtcaatcgaccctgagcagcattaattacttgctggccttcaagtacattacttgagccagtttttttgtatccatgtcaagatcccaagtaatatatggcgtgtcactgtcacccaaattttcatgtacttcaattccgctagcaactacttttttggcaaaatttggcacggtactagtcaacggtaagttgaaaaagactaaagtttgattctcttctacttcctccgctacctctgcagctggtaattcaaacttcattaaacccgttggcacttcatcttttgctacatctgctaaaacgccataccaatacataaagctgtcctcacctgataccactaggacagaacgcttattttctaaattatgatcagctaaaaatttttgaaaagtttcatcattttccatttgctgattagcttccataaagctcttttgagcattcatcaaaccagctggaaatggacaaccaataaataatcttgattcaatatttttcttcattttttctcctaatattctactaattcgtctaaatcaattatttcaccgtttaaaaaggcatcaatctcacctgatgaaaaaccgtgactaaacaaatatttttttattttaaaattgcgttcaatttctggaagatttctaaaacgcttgtaagccttaattccttgtttcttcaaagcttctgtttgtgcattctcatcttctttaagatccattgcatcaataataacgttactaatcccgctatcaaagccatgcgttaataatttagtacgcatcttacgctctaattcacgctgtgaaatcttgccaacttgatggctcatcgacttaatcacgcgttggcccacttctagccaatcttcttcatcaatttcatctaacttatcctgactaatttcaggatcaacgcctttttgcgtcaactttcgtaataaacttttagggccatcagagccaacacgcaaatcatttttgataaacagcttggcatattgacgatcatcaagatagcctaattcattcaattgactaacagcactattggctgcttcatcagagatttcgtgtttttttaaatattgcagcacctcaaagatggtccgaggctcgtaactcaaaaaatgagccgctaaatcactagccttagcatcagcatcaaattgcctaatcttttcaacctgctcatcatttaattctttacctttaagcagcacaaattctgccaacgttttctctccggcagaaaaagcatattttccatcaataaaaatattatagcgacctggccgtttttgtgcacttactttggttatgatcaacttgtttcacctcgcatatttttctacatccatgctagcaaattttgctaaagcttgctaagaactttttccaggtagtacaattaattgaacacaatttagtttttagtagaaagaattaacgatgaacagaaaatttacccataataaaccaaaacatgaaaaagacgtcatcatcactattaagcgtttaggaattaatggtgaaggaattggttactacaagaaaaagattatcttcattcctggtgccttgccagacgaagtagtagttgccaagattgttaaatcatatccacactacatccaaggcgaactggttagaattaaagaaaaaagtccagatcgcgtagacttccctgaaggtgttgatcccgagattggtggcttagaattagcgcacttgtcttacgacaaacaacttgaattcaagaagaacaatatgcttgaatcattacgcaagtaccatcctcgtaattacaataagtataaagttaaaaatactatcgctgctcctgacccatggcattatcgcaacaaggctcaatatcaaattgaaaaagatcatggtcaacttaagcttggactttttgctccaaattcccaccgcttgattgacttaccaaagatgccaactcaaagtgaagacacacaaaaaacggaacgtaaaatcaaggttttaattgaaaaattgcatgttcctgttgccaactatcgtcgtcatttacctggcattaagaccgtagttgtccgtcaatcagaagcaactaaggaaatccaggtaaccttgattacgatcggccacaagattaagaacttaattcctcttgctaaagaaattatgaaacttgatcatgtagtttctgtctatcagaatgaaaccgaatggcagaatccacaagtttggggaaataaaaccgaaaagcttttgggcaagaatcaaatcaccgaagaaatcttaggtaaaaaattcgccttatcaccacgtgccttcttccaattgaacccagttcaaaccatcaatctttactcagaagcattgaaatacttagacctaacccccgatcaaaccttgattgatgcctatagtggtgttggtaccttaggtattttggcagctgaccgcgttaagcaagttgttggaatcgaaaccattccagaggcagtcaaagacgcacaacataatgtcgagcttaaccacatcaaaaacgctgattatattcaaggcagtgttgaaaaggttttgccagaattacaaaatagtggtgttgcaatcaatgctttaatcgtagacccaccaagaacgggcttagctaaaagcttgatcaaaaccctcttgcgggttaaacctgaaacttttgtctacatctcatgtaatccctcaaccttagctcaagacttagttttacttagcgaggcatatgatgttcgggtcatccaaaatgtagacatgttaccacaaaccccacgctgtgaggcaattgctaagttagtgctcagaaaagatagataaatccaacaacctagtcttgggctaggttgtttttgtatataaaaaagcggctactggacaatcctgtcccttagtagccgcaatttcaagtggatgaggtagctcatcaattgatagtcacgatttttagttgtttggtatgtatttaaacaatggcattatcgcaaccaatattaacattcacttgttcgggtctttacataaaatgtaacttttaataaattggagtttttgcgaacagccaatgataattaatcaaataatttttaattaagctatttatggctgacacctctacgtatagagaatctttcaagtttccaataataatacaattctggagataaaaacttacttatatttttttatagttgttaacttttatttctacctcttccacactattcattatatctagttgtgaaaccgtttacaagaactaacccacatatttttgcaaaaatctttctacttgttgtcgatattgctttggatacattggataagacaaagcatgccctgcaagtggcgcaagccaaatttgctttggagcagctgttgccgcataattttgccagaccatcttagttggcacaaagtgatccttgccgccatgaataaataaaaatggtcgcgtatttttatttaactgagcaaccgcagaagcatcttttaaataaaagccatttttcactctattaattccactaaccaaatcaactattggaaaccgtggaaaagccttcatatgaaataaattttgagcttgatagttaatttcacctttcacggttgaataaccacaatcttcaataaaagctttcacttgtggtggcaaaagcataccgcttaccatcattgccgttgcaccacccatgctttgacccataattacaatttgggcatttgtaccagtttgatcaattacttgatagatccaacgcaaaatatcatctttttcagcccagccatagccgatatacttaccttcgctgcgcccttgggcacgtgcgtctggaacgagaacattataaccaaaatcataaaacattttggcaaaaccagccatactatctccatcactcataaagccatgtaataaaattgcggtttttttggcatgttgatcaaggtactgggcgaacaaagttatgccgctatcagttttttaagtccatgttttcttagaaaaatctctaaaccaaaccttatcacgataaagtggatccttgcctgataattctttggagtcagcttttttattaaacggtgtcatcgccatcttgaaaaagtactcgcttgccgcaaacaagccagctccagcaattaatgcggaagacaataatagtttctttttcatcttttaacacttccaaattcaattatttcacttttcattttataattaaattgctgaaaatttacaatccttatgacttaattatactgaaaaatgcgcttaacagacttacttcaattaatcgatgacctgaacctgaatactaaattttatctaaagcatgatgacaaactacttaagtggggaaaactcactattgccgaaggaaaatgtctgctgctacccgggcaaacagcaatgaccaaacaaaaattgattaaattagttggccgcatgcatggtcgcggcatccccttgttaacggtcattgaccaaaaagaatattccattttcggcctacagattcgcgaagatactggacaagcaattttaatgtaaaaaaagagcacaaatgtgctctttttcttattcttttacgcggtattgacgaatatgatccttagtaccagcaaaataccaagtacctacttcatcgtcgctagttaattctaagccatcctcaggatctaacaaagccgtattgaagacgtcttcatattgcttaactgtcagcttcttccgccgatcaagcattgcttgatcagctgtaggatcaacttgtttttcatatccttcaaccaacttgccactataaaactcagccattgcacctgaaccatatgaaaacaggccaattaatgagccagcaggtaattcaccattctctagcaaactaagtaaactcatataaagtgaagcggtgtagatattacctactcggcttgataattgtttagcagccgcaaaactacgctccaacttgatcattgttgcttgatcttgcccctcaatcgcaatattattagcttttaagcccatcttagtaaaaggtaaatgataagtaattgcatcaaaatcactagtctttaatcctttttgcttcttataatcagtaaaggtcttcttgaagaaatccaagtaaacttgagtcgaatacttgccgtcaactaaagcggtgcgagaataatttggtctccagaagtcgttaatatcttcgctgtaagctgaatgaccattatttagggctaaaatgcttgggtcagctttgatgagcattgccacgctaccggctccttgtgttacctcaccagcagtattaacaccatagcgagcaatatcactaccgatgacaattgcggtttgttcaggatgtacccgaacaaaatcacgtgccatcattaaggatgccgttaaaccaaagcaagcttcctttacttcaaaagttcttacttctggcttcaactttaaggctgtttttacaaataaagaagctgactttgattgatcaatactactttcagtcccaaaaattaatagaccaactttgttcttatcaatcttgtcaataaactttaaagtcgcattaattcccattgaaactgcatcttgcgtaatatccgcaacactcatctctctttgaccaatgccaactaaaaacttattttgatcttgctttcttgcgttcgccaaatcgaccatatcaacgtacttgtctggcgtaaaaagtccaatttgatcaatacctacttgcattatttttgctaaaagctccttagcatgactttcagaataatttttttcactaatcatcgcagctagtagctgcttgcgctcatgttcattatcggttaactcagcaaccacatttctcgcctgcagtttcatatgtcctgcttgaatgccaacagtagaaattgccagcaaagctgctaggttgttggctaaagccacgctaacaataatctcagctagagttttactcgtgattttttgtcctaaaatagcaaaactttgttggacgtcatgacgggccttaattgagccaccaactactccgatcgccattggcaacgttaattcgccaactaaataactaccctgcatcgtccactttgataaactgcgatattggccatcatgattggctaaaactgcagtggctgcttcaattgcccgataatcattgcctgtggcgattaagacggcgtcggctccattcatgattcccttattgttagttaccgcacgataaggatcgtcaattccaatttttcctaatagagcaacacgttgtgcaacttgcatcccaccaatcgtttgtggatcaatcttcactttagccgtggccaattggctaggataatttgataaaatcgcaaataatttttcatcaacaccagcataattttctaatttagccgctaaaaattccaaaatcgagttggttttattcgcgcccatcgcctcagctggatcaaccaatacttttaagtaaagcaaatcctctttctgcacagcagttatttttctagtaccaccaccatgacggactaagctggaaaacttttgattagctaattcgactaagtgcggaaattctttttctaattcaattaatgaaaaagaattgttgaccttcaaaacgatttgaccataaatcccttgtcggtcgctgctagctgtcacaccaccatttctagcaaagatactagctccatgattggcggcagcaactactgagggttcttcaacagccattggcacccaatatttttgtccattgactattaagttttgtactacgcctaaaggcaaacgcaactgccctacaacattttcactcaattcatctagacgtctcagaaccgcatcatcgatttgctctaatgcaataccttcatcctgcaataatttacgtctagcttcaggctctaattgataaaatttcattctgcattctcgatttcataagcaatcgcctgaccgccaccaatacacaaagtaaccagggcacgtctgccttttctcttctttaatccactaattgcactagcaactaagcgtgtacccgttgcacctaaaggatgacctaacgcgattgcgccacccataatattcaatttatcagttggaatttgtaagtcgcgagctaccgctacactttgggctgcaaaggcttcatttaattcgataatatcatagtcatcaaaattacgccccgtcttcttaagcagttttttaactgcataatatggagtataacccatcagtgcaggatcaaagccagcttccgcaaattcacctaacttggcaatttgcgttaagcctaactctttcattttctccttagttgccagaactaacatacttgcaccatcagtcaaaggagacgagtttccggcagtcacttcaccatccgccttaaaaacaggctttaagttactcaatgcctcaagcgttgtatccggacgaattggttcatcatgatctaaactttgaccatcaatctccacatccaggatctcattatcaaaaaatccggatttaactgctgcagctgcctttttatgcgactgcaatgcaaattcatccatatcctgacgactaacatgatatttttctgctacgttttcggcagtaattcccatatgcttgccagaaaaagcatccatcaaaccatcgttaagcatagtacttactaggtgatctgctggatcatttttgttttcttttttaacaaaataaggcgcattagtcatgctctcactaccgccgacagctactagatccaaatcgcctagttccatctgtccttgagctagacgtaaagctttcagacttgagccgcagacttcattaattgtaacggctgcagaagcttcactcatccctgaatgtaaggcaacttggcgagccatattctcacctaagccggtatccaaaacattccccataaacagtgcttgaacatcagctggcttaatattgcccgccttcattgttcctttcaaggccattacacccaaatcaattgcagaagcatccttaaaaaatcctcggtacttgccaaaaggtgttcttttagctgcaacaatataaatgtccttcatatattttctctccattctccataatgtgtattttttaacaaatatgataatagcaaaaaaatattaagaaaaacataaaaagactacgccgcagcgtagtctccctaataattaagcttattttttattttgcttaccttcagcttcaaacttcttgctcaattgcatgatatatgcccgcaattgttccttaatttctgggtgcttcaaaccatattcaattgaagtttcaaggtagccttctttgttaccaacatcatgacgttcgcctttaaaggcatgagcaaagacacgttgagtcttgttcattgtatcaatcgcatcagtcaattgaatttcaccgccacgacctggtttttggttagccaaaatatcaaaaatttcaggtgttaataagtaacgaccaataatggcataatcactaggtgctttatcaatatcaggcttttcaacgaatgacttaacattgatcagtcctggcatgatctcattttccggttcgatgacaccatacttagaaacttcttcatgtggcacaggcataactgcaattgtagaagcatgcgtcttgttatagcgatcgatcaattgcttggtcaatggcaccttatcttccattaagtcgtcgcccaacataactacaaatggttcatccccaacaaaactgcgagcacggaagatggcgtctcctaaacctgctggacgcggttgacgagtgtaatacaagttaacgcctaaatcagtaattccttcggttaggcgaagcaattcttttttacccttttcttccaaatcttgttctagttctggattagaatcaaagtgatcttcaattgagcgtttgttcttgccaattacaattaaaatatcttcgattcctgactttttagcctcttcaacgataaactgaattgttggtttatcaacgataggtaacatttccttaggtaaagccttagttgcaggtaaaaatctagtacccaaaccagctgatgggataacggcttttcttactttcataaaagcacactttctatttcaattttataagttcatcataacaaaatatgcatttttcagctacttagtttttcgtcttttcttttgaatataactggcaatacgaccagcagaatattcaacttgtccaacacggtttcgcacaatagcagcgttaacaccaacgccaaataaaaataatactgctgcaatattcaaccagagcataaagatgataaacgtaccaacaatgccataattctcccaagtaatcgggaaatggtgtaaatagaaactaaaaagaaatgatagggctaaccagcctacaacagttacaaaaactcctggccaaattactctctttttgagttttatattaggcaaaacatagttcaaataccataatgctagcatcataaccaatattaatactggatagcgataactaaagattttgctaatttcattaagtggtagctgaaaaatcggtcctaaaaagttgagtacttgttgcccaaaaaccaaggccaatgtagcaattgtaaatactagaatcatcaatcctgtaaaaacaaaagtaatagttctagtccaaagaaaattaagcattgataattttaattcaacttgatgaaccccataaagtctattttctccaagacgaattgcattaaccatatttgataatgaccaaactgcaaacacaataccaaaagaaatatagcctgttgatgtcgttttcaataaagaatttataattggcataatgaattttgacacttggtctggaaaaaccaagttcaaatattcagcaataggcgcagtatcaatgtgaaacaacggtaacacgttaccaatgataataataatcggaaaaatagaaaacaaaatgtagtaggcaataataattgaactagcaaatatctctccttgagataaggtggttcgtaatgtagaaataaattgcccaatttttaaaccaaaatggtttttaccatttttcatccattatcctaatcatccatctcatcaaagtgagggatgtacttttctaagccatcgtaaggatgctgcagggtcaagatcttaggaccatcttttgtaattgcaaaggtgtgttcaaattgagcagcattagaaccatctggagttgcgtagtaaacccaatcatcgttaggatcatcaacagtacgttggtcgatgtgccagtcgccaccagcttctaccataggttcacaagtaatagtcatgccttcacgcaagcgaagaccatgacctgccttgccccagtgaggaacttctggatcttcatgaattgatggttgaataccgtggccaattaattcacgtacatcaccgtaatgattttcatcttcaacataatgttggatagcagcaccgatatcaccaattctgttacctaaaacagcttggtcaattccgagatacattgcttttttggttacttcaattaatttcttatcagcttcggaaatttcgccaactggataagtagtacatgaatctgattcataaccgttcaagttgcaagttacatcaaccttaacgatatcgccttcctttaagatgcgatcttttcttggagtttggtgggcaatttcatcgttaaccgaaatacaagtaccatacttataaccctcaaaaccttgttctgaaaggcggccgccacgacttgatacgaagtcttgacaaaactcttcaattttccaggtagaaatgcctggcttaatcacatcacgtaagccttcaaacatagttgcaagaagatgtcctgaagcttgcatgcctttaagttcacgaattgatttaattgtaatcaaaataatttctcctttataaatttttatttagtttcagatatttctattataccgttttccaaaatacttttaaaaggtcgggtttttgtagaatcaaaacaaaactctagaaatacctgaaatatttttaaagtttgctaaaactaaacgtttttgcaatagtttcatgtataataaggtgtcgtataatgcagtgaaaggtatgaaaaatcatgaaagcaagaattgtttatgccagcatgactggtaacgatgaagacatggctgatattttagaagaagatcttcaagattatggctttgacgttgaaacaagtgatgtcggcttcactgatgccaatgactacttagatagtgatctttgcatttttatcacctacacctatggtgaaggcgtaatgactgatgaattggcagacttttatggggagttaaaagacttagatctaacaggcaaacattttgctgtgatgggttctggcgataagacctacggtgaacacttttgtgaaaatgtttttgactatgaaaaagcattcaaggattgcggcgcaactgaaattactaaacccgtaacaattgaaaatgcgccagatgatgatgcagtcgctgcaatcgatcaagctgcaaaggaaatggccgataagttaaatggctaataacaaaaaagacgtcacagctgttgatcaggcacaaatacgccgtctaggtcaaaaattaatcaagcgacaccgtaatctttgggtttacatggttttcggctttgtcgctgcattaatcaataccttagtcttcatggtcttacactcatggtggcataatgtgatggtaatttctaacaccatcgccttcatcgtctccaacctggcatctttctggtttaaccaaaaggctgtttttatcaataatgtcgatcatgaacacagcacgtggcataaactaatcgtctttttcacttatcgcgtcatcagtttaatccctgatacattaattatgttagtcggcttatcctggctgcatttaaacgcattactagtcaaaattatcgaccaaattttagtcggtgtattcaattacttaactactagatcagtctttcaaaagcaagaacatactatgattgaacgtgcaaaaatgcgcattcaagaaccaaaaaataaaagagacagcaaaaattaaacaatgtcattaagttaagacattgacaaattatcgacttggacttttaagatcattcatttgcgatttatcgcatttgaatgctcttttttcatgccaaataaacccaaatcttgtttagaaattaggctacacgatataaataatatacagctgatttgggtttgagatttcttttgtcttttcgtcctggtctgatcggaattgtgtaatgactaatttgaataagaatctttttaaagatttcagttgaagaagaaattatatacatagcctggatgacaaaacatgactgtttgaaattgatcgcatattgatacttgcattttttttgtggtacatatgcttgagcatcaatttgactgactgcgttaaacataatcatgtgggcatagatctccatttcaataaatctatcctgcttggaatgaaactgtacgctacctaaagcatatttcaactttttgaatgaagtttcaatgccccagcgcaaatggtagatttctttgatcctttttaagggataatcggctctatttagattagttagaacaacttcccattcttctttgcctgatttaggatcattaattctaaatttacaggcacgaaattttattgtacataactctccaaagtcccagctgccatctttggtatttttagaccgatattttatatattgacggtaatgatggttaaccaaatgaacgttttctgtagccttatgggtttcataataataattagaggtagtcacccagcaagctatatccttatcacactcttgattaggcaactcagctacttccttaaatgcgccatatcccgttttagtacgtatgacataataacagttaggcaggcgattacaattttcaatcatgttaaagccggtataacctcgatccatagtaactatatatggtccgcaatttagctttttaagcatttgaacggcggctttacgttcatccatctttgacttaggctgaaagatgcagtcttgataagtattatttaacaggtcatagagtgcattaacatgaatttggcaatatggctttcctttatgattgagatttccaacgatattctctgatttaggattccagatttgattaaaatcagacccatcaatggcaaatatacgatatttatgatcaaataactggatattaaataaattctgattaaatacagttagaatatgcttaaaacatgcgggtgaaagctgacctttgcgttggacataagcggaagtactgactactttatcgttatttttaatagctttttggccaaaagctctaaacaactcactggtcaaatcttttccttgcatattaatagtagttttaatgactgtagctgcatctaaaaaccgcttcctagtgaaggcatgaggatcatcgataaaatcatgaatatgctttccagtatcattgataatttgatcaagacgatctaaaatatttctgtgaagggctttcataattaacaccagctttctggcaataattttgaaggtttaataatttaatcagagggcgaaaaggtaggttcttttcgcctttattttatgcaaaaaaagaaccaaatcataatgattcggttctacagagattagattcaatttgtcaatgtcttaacttaatgacattgaaaaattaaaactgtctctttatttttttactcaaaatcttttggtttactttcactatcttgattaaagtaataataaatatcatccataattcgatcagctgcatgtccatctccatatggatttttggcattcgccatccgatcatattcgtttttgttttctaacaaagctagcatttcttcacgcaccttgtcgacttcagttccaactaacttcaaggtaccggcctttacgccttcaggacgttccgtcgtatcacgtaaaaccaaaactggtttacctaaactaggagcttcttcttgtacgccacctgaatcagtcatgataaagtatgaacgtttagctaagttatggaaatctaccacatcaagcggctcaatcaaatgaatccttggatcaccaccaagcacttcattagccactttttgtactcgtggagataagtgaaccggataaataatttctacatcaggatgcgaatcaattacttgccgcattactttaaatactcggcgcattggctcaccttgattttctcgacggtgcatagtaaccaaaatcaccttattaccaggagtaattgcgtccattacctcatgatgataatcttgttgtacagtctgtgctaaagcatcgattgccgtatttccagtaacgaaaataaaatcagaatggtgattttccttcagtaaattagccttactcaattcggtcggtgcaaaatataaatcggctaaatcatccgtcatctgccgattcatttcttcaggatatggtgaatacttattccaagttctcagacctgcctccacatgtcccaatgtagtttgctgataaaaagtagctaaagaagccgcaaaactagtcgtcgtatcgccgtgaaccaagacaatatctggtttctcttctttgatcaccttagataaatcaatcatcactttagaagtaatttcttctagagtttgattttggtgcataatattaaagtcataatctggtttaattttaaaaatatctagcacttggtccaacatttcgcggtgttgtgcgctaacgaccgttacttcttcaaaacgatcatctttttttagtttcaaaacaagtggtgccatcttgattgcctctggacgcgttccaaaaacagtcattaccttaattttcctcattaaaaaattcctccgcttaactattttactatacctgattttagactatcttgcacccgctttctgtgttttaatggaagtattaaattgaaagttggtcgatgcatgaattcatcattactattattaattacaactggtttaattattttgattggaactttttgccttgtttttggtatggacaaaaacagacccgctaaaactagaaaatatttactttatactgcactaatctgtgttttcctagtttggggcttaattactgcaattatgcttcaacccttaggataataaagataccttttggataaccaaagcatgtaaaaagcctgcaagaccaatacttgcaggcttatttctatgaccccggtgagattcgaactcacctctacggtttaggagaccattgttctatccagatgaactacggggtcaaacctaagattaactttaccaaaaaaagtggtaatagttaacctttttttagaattgtggattaaaaaatgttttcggatggttggtatcagcaatcttatcagctgctttaacaaaaggcatccaaattagcaaagtaacaatcatatttaaaatgcttaaaacaattgcacgccaatcataattgcaagccagaaatgggccaataactggtggcatgatgctaggtactgccacttgaactggattaaccaatcccataatgctaacccaataagaaaaggcaacattaactagtggcgctaatacaaatggaattagatacactggatttagcactacaggcaggcccaagagaattggttcgccaatgttaaaaattcctggagctagtgagattttggcaattgtgcgataatcactgcgtttagaaaacattaaaatcgccacaattagcattaaggttccaccagcaccgccaaaccaggcaaagacatcaaatgagccacgtacccatacatatggtggaatatttccattactaatcgctgtgatgttatcattttgagcagtcatccaaattgaatccaaaattggtgatagaacccctataccattaattccaaaaaaccaaaataactgcactaataaagtaatgacaattaccgtaccaaagccttgtccccactttactaatggagtttgaattgtggtaagcaaccaatttccaaaatatttaccggtaagaatttggaacaaataattaattccgcctacaccaaatattgcaatcattgcaggtaataaagaatcaaaagcagcttgttcagcatggggcaagttcgatgtcacatgcaacataatccttgctttatagcaagcataataaataaaaaagcctaatgagccaaacaaaatagcagtaaagaggccagtagttgagaactgactaatgtcaaatgcattatgcagtgtaacattatcaccatgaaatttaatcttagctatattggcaatgcttagtgcaaaagaagataatgccacaattgaagcagcaagtctatttccttcaaaagcttttgctagttgatagcctaaagccaatgctaagaaaaaggcaaataatgaaaatgttcctcgccaaactaaattactgattgctaccaatggctgtatcgcaaaagcaaaggcataccagcctaaatgatcatgagctgcttcaattaagctcttaattaaaactgctaatgatcctgccattgtaattggcattaatgagacaaatgcatcccgtaaagcaactagccatcttatctgaccccatctactagctagcggcaaaacatagtcctctagccatctaactaaacgaatcatttctttcctttcaagtaatgtggatgatatcccttgttcttattacgtttcttgcgttttttagttttatttttcttagtcgaagtcttaatgggctgctctttagcctgcttcttttccttcttgagtttaggcttttcagttgttaaatgatagcctgcaaagtagacacgctctatttgtaattgatctgccaataatttcttcaaatcacgaaaatcgtgatcatcgcctaaggtaaccacataaccttcagcgttcattcgacctgttcttcctgcccggtgcatgtaagtattagtctcgctcggaatatcaaaattaatcacataggtaaggcctggaatgtccaacccacgcgcagccaaatccgttgctagcagcaatttcgtcttaccagtagctaggtcatttaaggctttttcacggcgttctttaccaaattcattagctaataattcgaacttagtcttagtatgcccaaaaataccagcaaagcgcatcatcgttttatttgaatcaaagaacaaaattcccttaaagtgatccaacttagtcattcgctgcaaaaattcaatcttgtgttgattgtctacttgcaaaaaataatgtttagtcgctgaagcttgttcatttctgacatctactaacaagaaatgacggttaaaaacttgctccgcatcccgtgtaatctcagaatctgttgctccaaataataagatttgactgtctggacccagattttgccctaatgctgataacaattccattttagtaaattctaaaatatcatcggcttcatcaataatcaaagtcttgatctggtttactttaattcgaccacttgagaagaagtcaaaaaaacggcctggtgtagctacgaccacttcaggatgctttttcttcagattgtcttcttgtctctttctattgccagcaccaaccaagctgacgccttttaatcctaaagcgtggatgtaaggattaattgcatgacgaatttgtacagctaattcagtcgttggcgcaataattaccacgctgttagcattacctggctgtgctttttccaaactaggaagtgcataagccaatgtcttacccgtacctgtcttagccaatccaaccaggctcgcaccattgcgaatggcatcatagctttctttttgaattaaagttggctggtccttgtgttctctaattaaaacttgtttgattttttcttgatacattattactgtgttaattgcccatacttttgcttatattgaccaacggtcccgttatacgcgtacatcgttacctggctttctaagcctgaaacattccttacgcgtccgttagtagtgtagcaccaaaatgaatactttaatttattcggtgccttactatctgatgacataaataacgtttgcggattaaagtaatgttgatatttatgatcaactttcaccatgactcttttgccagctgcttgcaataaagccgcaaactgccccattgaccgcaaatatctcgctgaacgagtagtcactgccggtacaattagaattggcagcgagcccgtattttgtcctacttgcttaaaaaaagtagcggtaatgctgcatcggagtcgattcattgctataggaaatctcactaccaaatgccaagttcgttcctaaaatttggtcacgataagacagatagttttcatcaaaatatgatctgccttgggttgctttcaaatatataaaggaaacgccattagattgcaatttatgtaaatcaacatagtcaatatcttgatttaactcaatcccaatcgcacttgaattagcatctggcggtaaagttgtttgccgcttaaaattgaaaaagccaatcaaaagaaatgcaatcgccagaattaataaagtcaaaatcgctggcaaagtatacttatgctgaaatcttttcatcggctaaattcctcccttaattattttaaccgaaaagcctatcaatacaaaaatttccgagactgtaaaatagtttgtgtaaggatgaatgattccttaaatttatttctttaaacattagaaaaaggagttcctttctcgtatgattggtttgaacaaaaaaaacacatacagaaagaagaactccttcatgaatgattttaccaaagattttgctcaagctctattcaatccagacaaaataaatgatttattgcgcaaagagctacaacaggctgttaataacttgctagaagctgagttgactgcctttctaggctatgatccctatgccagaaatggctggaatactggcaattctagaaatggtgcttatttccgcaaggttgatacccagtttggaccaattgaagtgcaagtgcctcgagaccgcaacggtcagtttcatcagcacacgctgcctgactacaagcagcactctgatgttttggaaagcacgattatcaagctctactccaaaggcgtaactaccagagaaatcgctgacttgattgagaaaatgtatggcagtcattatagtccagctcaagtatcaaatatttccaagcagatgctccccaaggttgaggcttatcacaagcgcaagctaagcgacaagtttttctgtgtctatttggatgcgacataccttcctttgcgccgagaaacgtttgagcgtgaagcagtatatattgccattggcattaaacctaatggacataaggaagtcattgactactgcattgctcctagtgagaacattgaagtctggacagagatgcttcaaaacatgaagtccagaggcttgaagcaagttgaactctttctttctgatggtgttgttggcatgaaaacagccttggccaggacttatcctaaagctcattttcaacgctgcctggttcatgtcatgcgcaatatctgtgctaaagtccgggtggatgaccgcgaaaagatcatgaacgaattcaagcagatacatcaacagacaagcaaaaaagaagctgcagctgtcttgcacaaattctatgccagatggaataaagcttatagccatgtcatcaaaggtttgaaggaaattgagcccgatctgctggtcttctacaattatcccaaacaaatcagagcttcaatttattcaaccaatatgattgaatcctttaacaacgtcatcaagcgtaaagctaagcctaaggcagaatttccaactgaacagtcgcttgatgcatttattggcatccaggcaatgagctacaatgaccgctatttcaaccgaattcataaaggctttggtcaggttcaggataccttagaatcttattttgaataaataattaaaaaatcaatttacgagaaagaactatttacacaaaagatttgacagtttcaaatttccagtcgatgtgctaaaatttaaataatgtaaacgaagggcaacaaataaatatgaaacgacaaatctcatttggccaagcattggctaccgtagtcggttctgtcatcggagctggcgtatttttcaagatcggaacaattactgcacaaactggcagcacttcaatgaccctgtttgtatggattttagctgggatcatttcaattgcatcaggtttgaccatttcagaaattgccgccagcttaaaaattaatggtgccattaagtatcttgattacacttacggccgcgtgtggggttttctttttggctgggcacaaatgattgtttattttccagctcaaattggtgccctaagctcaatttttggcgttcagtttgtctccttatttggaattaaggcgaggtattctaacctaatagctatcttgctagtgctttttctcttaggaattaatctaatcggaactaaattttctagcaaaatgcagtcggtcatcactatcctaaaaatcattccaattgctttaattattatttggggattatttaatcctgccaaaatacctgcaccaattattccgttaacagtcggcactggacattcatttccaaccgccattagtcaagggttactttctgcgttattcgccttcgaaggctggattgtagtgactaatttggctaacgaagtcaaaaatccagaaaaagacctttcacgggcaattattttaggtctttcagcaattacattgatttatgttttaatcaattatactttcatgaccgttttacctattgatcaattaactaataacaataatgccgcgtttcaagcttcaatgaaattgtttggtcaatttggtggaaaactagtcactgtgggaattttaatttctgtttacggtgcggttaacgcattcatgctgacagggatgcgcacgccttatatcttggctcaagacaatttattgccattctccaataaaattggcaaggctaatatccataccggtgttccagtagttggcgcgtttattgttgatgctattgcaattgtcatgattctactaggtaattttactgttttaactgacatgctagtcttcgttatgtggactttcaacacaatgttgtcagttgccgtaataattttgagaaagcgtgagccagaattaaaacgtccatttaaggttccatggtatccgatcattccaattatttccgtgatcggtggtatcttcatcgttgtctcaacaattatcaatcaatttgttctttcaattattggtattggtttaacattgttaggactgccaatttactattacatgcaaaagaaaaataattaacgaaaaaagccgccgattttgggtgactttttatttgagtaaatatatttcctgaattgtcaaattaagtgcaacagttaggttatgaagagatatattgcttgaagagttcctctgctgtgtgatattggaggattcggcgatatttgtggttaatggcatcagttgcctgttgaacataagcttttgacttgtctttcatgctcttgctcttagggaagaattgacgcaaaagaccattgcagttctcattggtgcccctttcccatggagaatatgggtgagcaaagtaaatctggcagcccttgatcttggtcatatccgcaaactcagagccattgtcaaacgtgattgatttaaaccaggcaggatgtctgtcaatctccttttgaagcagcctttggcatgtgcttgcccgatagtcaggaatcttgataactacttcaaagcgtgtggttctttcagtcaaagtcattaaagcaggctgattcttgcgtctgacgcctttaaccagatctccttcccagtgcagcggagcttttctgtcttcaatctctttaggacgctgttcaatggaattgccaagatgcttcttgtgcaaagcgtgaccgccatggctgtgatgacgcttgttcctgcgtcttttgagcttcataggcagatcaatattgcttatgtccagcaagccctgatcaatatagcgatagacagttggtgtgctgggacaagggtagcctggcatagtccttttgaattcaccaacgaactcatcgatgctggtggcatcaaatttagctttaaagcgtctggagagcattctcaaaaagacagcataatgcttcaatggattgcgctgatagcagtttttgcgacgcttctcataataaatctgtgcagtatcagcgtaatagtgctcatacaataaatagctgctgtctctttgcaggacacttccgcgtttgatttcgcgactgattgtcgacttatggcagccgacttcttgagcgataacagtacgggaagttatgccggaatccagcattgcttgaatttgtccacgttgtacgctggttaattgatgatagtgcttagaaatgctagaatttgaattggtcataaagatcttcctttcttgatttttcgtcacttcaagtttaggtcttcatggcctttttgtttaacacttagtgttgcacttcaattttaaatccggggagtaaatatatttattaatgttgtgaagcaccgctagttgcatcattttcttgatgatcttcataggcagtattggcagcaattcgaccaaaagtgaaaatatctgccaaggagttaccacccaaacgattaccagcatgaatgccaccagcattttcaccagcagaatatagaccatcaataatttgaccatctttattcaaaacatgtgccttagtatcaattactaagccgcccatagtgtggtgaatagcaggctttctcggagtagcatagaatggtgcaacttcacatttgaggcctaatacattcttatggaagtctggatcctcgccacgatcaacgtaagaattataatcctggatagttttaaccaaaactgctggattcattccaatttgttttgccaaatcttcaagcgtatcagctctaaacaaggttccagccttaacttgcgcatcaagtgactcttgggttgtattgtaagcagtgtccttaatcttatcgtccgcaatttgataaatcaaaccaccattttcgataactgccttagccaaaacatcccgttccgcaaattcattaacaaacctcttaccctttttgttaaccataatatagttagcaggcggagttacaacaccagtgaaaagctcaccggtctttggatcagctactggcattaattggataaagcccataccgaataagtctgcaccagcttcaagacctaagttaatcccatcgccagtaattgcaggtgaattagttgttgtactatcgtactatcgtctgcaatgtttggccaataggtattgtatttttgaaccatcttagtattggcaccaaagccacctgccgttaaaattactgccttagcatgcacagtcaaagtactaccgtcagcgcgtgtcgcaattacaccgcgtactttgccatcttcaataattagtttttcaacacgagtttcaagatatggatcgacaccatgctctcttatccaatcacccaaaacgtgaataaaggcataacctaatggctctactggcttatgacctctgcgccacaaaccaccaactggttctgtaacttgagaattatcaaacttaacacccaaatcttggagccatttaacagaatttaaagcattagttaccaattcatgtaccaaagcatatttaccatgaatttcgttaccttttaaatcagtccttttaccacctaaataagtttgaatttcatggagtaaagtcgaatcaaataaataatctgtaccagaatcaatatattctttgatttgtctttgtaatctttcaaaatcaaagcggtattctaaatcaatttgttcaattggcgtattagccaagtcttctaaagtctgtttttcaccaggaagagccttaaatttactttgccattctggttcagccgcattcattggaccaccagcacggctagtattaccaccgatctgtggatacttttcgagaacagccaccctttcaccatgttgaattgagcgaactgcagctgctagaccagcgccacctgcaccaactacagctacatcaacagtaatttcttcatcttctacctttgtagcagcgggcttttcacggtttttccattcggttgaatcgccgcctgcttcatcaattgcttcggctacgccatcaatcacaccatgactggaaatagtcgcgccactgaccgcatcaacgtttaaagtttgattttccacaattgttttaggcaaacgtctaaatacttcatcggctactcccttagtttcacctgatgaatctactttgattgaagtaactttatcgccatcaatgtcaacttccattggcattgattcggaaccatgacctttagcttttacttgatattttcctgacttcattgcttacacctctaataagtttaattttatccacaagttaatattagtgcgtcatctgttgatgtatcaaatatcaatttcactatactttcataataaaattgttatgagataactatgtttcgttctccaaataaaaaaagcttaatgcaaatagttatccacattaaactttttaattgcatgatttaattaataaactgaaacttgaaagctaagattaacgctccttccccgcgcctcttggctttttcttatcaaaaataaaaacgcaggatctctctgcgttatactttaagtgtcaacctgaaaagtaaaggagatcctacgcaatgaacagtatagaacaaatcgacacagaaaacgataccaaatccttaatttcttcatttattaatctaattggtctagctaagttgactaaacaagtcaactttaagcgtaaatctaccgtttcattaaccatgattatctcttggctgatgtctgtacattttgctcggctttccttattcagagctaagagtgacaagcgtttttccgttagaactgctcgcaatgtacttaacgatggaagaatcaactggcaaaaactattatgcttgattgcagctcggctcattggctgcttcaaacatccgtaaaaagaaacattatctttattcaagcatagttgaggctcaatatcatggacatatctttttattaaagctcgtttttgtctccaaccgtggaaacaagaacaagcatttggttttagctactactcagacaaagcttagccctgaagaaatcatccaactttatggtcgtagatggcaaattgaaacatattttaagacgtctaagcaatatcttgctttagataaatctcaagttcaaagctatgatggccaatgtggctatatcgcagttacagcaataacttatgatctattgacctggcaggaaagacaaaatacagatgataagacaatcggagatttattctatctaatgaacgaatccttacctgatattagattcgtagatgcattggtctacttaatttcagaattaaaagagcttaaacagaatagttttgaaaagatagatgaagtaatcaatgactttattaaccaactgccacgattcatacaaattgcactgaaacagatcatataaaaactaattacgtctaagaaagctcaatagtgacaggacttgagcttgattttggtgctttcaagtttcagtatttaaattaagcttcagaggcgcctgatacagcatctgcttcttgttcatttgaaacagtaaaataattataattggtattatccgcagcagtcgtacctgcaacaaaaccagaagcatagctccaagaattcatcatacttggcattgaatcatgaccattagcaccaccaacaatttctcctgcagcatagaagttacttacgggattcatatcattgtcaagaagctgcatttgatcagtagtttcatatccacccaaagttgtgcagaacagaagtttttgttcaattacataatatgtatcgccttcgaactcatgcataaacttcttgtctctaccaaactcaggatcataatctgctttaacatcttcagtatagttatccacagtttccttcagcgtttgataatcaatacctgctttttctgccacggtcttcaagtcgcctttgaccagaactggactcttctcgccaaccaaatcaaagaatgattgaacctcttccttggtaaagccatacttaagcattaattcatagaaacggtcccaggttctttgatccatgacaatgtaagctaccttacccttttgttcagcaatcgcatccctaaaatgcgtataaggtgcagattcgttaactattctcttaccatcagtattaacaaaaatagcccccatatcggtcgcttctttagttgaataagttgttagcttagcaataccaggttcaacttccaatccatgtggatataccttataccagtctaagttacgagtaaccaaattcatatttttggcaaaatcaagataatcaccagttgaagtcattggaccataatatggaatatcagtcttatgagcctgataatcacgtgcaccccaaccaccagcagctaaaacaagtgacttgaaattgacattaattgtctggtgcttgccttcagcggttaaagataccagtttgccagccttatctttattcaacttttcaacacgggcatctaagataatttgtccgccctttttttcaaatgcctcagccaccttagtcactagttcatatgagctttcactaggcatttcaatttgacgatatacactatgttcaactgtttgggtttccgctttttgataagtcaaatttgcaaattcagtaataaagtctactgccttcccaatattgttagctaatagctttgacaacattggataattagtaccgcggcattcacgagtaatatcttgaactagtctatttggcgaatccttctttgccgtttcaccaaataattctgcagaaactttagagccagttcctacaacatttgagccatttaaaatagttgctccacctaaatagccatttttttcaagtacaactacttttttacccatcgaaagagcacgacttgccgccattaacccggccataccggagccaattacagccacatcaacatttagttgcctttcttcatgtacgacttctggcttttttccgtcaagagcaatgttattttcggctaatgcttttttaccagaatctagcattgcttgagtcatcaatgatgccccagaaacagcgtccacgtcaaaactttgattatcaataatatttttctttaatttaccaaaagtttgattaaaaattgcaggagtttccgaattcttggttactttgacatcactaattttattgttttctaagtcaatctcaaaatcaatttgaccattgcgaccatctgcttgagctttaatagtttgtttggtcataaaaactactcctttacttgttctttttactaaaccgcttatattataaccacaatattaaatctaaaaaataaatttaatttgatattttaatagaatttttttatcaaaagcagtaaataaaagcgagtgatcattctcactcgcttgattctttatctaattttcatccttatttattagcgtaatgttgaataacttctggcttcaataccccaacataaggaaggttacgatacatatttaaaaagtccaaaccataacccactacgaattcattgccaacctttgaaccataatattctaattcaacatcggtagttcttctggcttccttatttagcattgcacaacacttaacgctcttagcgccacgtgccataatgtgttctttcatgaatttcaaagttaaacccgtatcaacgatatcttcgacaattaaaacatcgcgatccttcacgtcagttaccaaatctgatactatcttgaccttaccagttgactcaaagccatcaccataactagaaacatcgagaaaatccagttgatgtgctacgtccatttgtcgagttaagtcagtcaagaagtaaattgcacccttcaaagccccaacaactaccggctttttaccagcatagtcctcagttaattgcttacctaaacggacgcacatctcatgaatgtcatcttctgtgaataatttgtgatctataatttggtcaatattgtcgccttttgccatttaatctacccttcaattcaatttacatatattattcctaataaaaagaattataacatctttaaacaaaaaaagcgtcattttcaacgcttcctctgaataatttctaattttcatcctttgattgatcgtctttttgatctttatccttaatcggttcaacgataaaccagcgcataaagccttgttcgatactgtctaaggtaaacttatatccttcaagttcaattgattcaccctttttcaagttaggataatgttccatcatgtaaccaccaatggtaataatatcgctatcttgaaaggccttcagatctgtatggaagaaacgctcaaagtcatataaagtcgtcttacctgaaacatgaacttgaccatccttgtccttgataatgtaatcatctgaaacatcatcaatttcatccttaacagaaccgaaaagctcttcataaatatccttatcagtaacgatcccactagtaccaccatattcgtcaactactaagacaattggtgtgtgcttagaaatcatcaagtgcaagatatcttgaattggcattgattcaggtaccgtgataatagttctaataattcttgttactggtacgttgccatcaatttggctttgttgcacaatgtcgtacgcataaacataacccacaacgtcatctttatcattatcacgcacaactggaaaacgactgtagccttcttccaagtattttttcaaggcataggcaattgtatcagttgaatcaagtactgacaatcttgttctgtcagtcatgatgtccttagcaaccttatcgtttaattcgaaagctctttccatataagttaagtcttctttatcaagcgaaccaccatgaaccgcattacgcgacaacttgatgatttcagattgtgaataaacttcattttcttcatcagctggagtaaagcccatcaattttaagattccattggagctagtatttaatagccaaacgaatggataaacaatcgtatggaaaatatgaagtggcgtaacgatccccatcatcatcggtactggcttgtcaatcgcaatattcttaggcacaacttcagttaagacaacttccaaataagttaataaaactacgcctaagattgcactaactgacttgatgagtgaatcattcattggcgtcaaatggaaaagatcttccaatatggttgcgaatgtatcagccgagaaccaacccaagactacaccaaccaaagtggtaccaacctgagtagttgacaaatactcattcaagttgtgcgtcatatgcaaagcacgacgcaactttttcttatttccttgacccttagcaagcatatcttcgagctgacttggtctagtttgaactaacgcaaattccgcagcaacaaagaatgatgcaacgataaatattaataatgttgcaactaaattagttactatttgagctggactcaaagtattatcacctttttttacaaatatattactaaaacctattttaccatttcttgcctaaaatagtgcagttttacacaagggataacggttttttgtaatttattcgaccaccttgtaaatttcattaaacggtacacgctttggaataaatttaggatcattaatttcagcattcttgtcgatatagccaactgcaattgccattccgacagcttcatcatctggaatttgggcatattctctaaccaattctgggtatgaaaccattgagtgagctggcatcacacctaagccacggttaatggctaaaagcatgatactttgtgcaaaaattcctaagtcaaaaacggaccaagctggagatttcttcggaaccgttaaaaagataattgctggtgcattgaacattgttttattcgcatcattaaataattgaagcttatttctgaaaaagaaactttgggatgcacccatcgtagccatattacgacttggataagtatcccaatctagtgatagcattgaagcaaaatcttcatgtgcaacttctttatcatcaatctttttagctgaagcagccttaaacttgcttaaagcatcccccatcaaaacatatgcacgccatggctgagaattaagcaatgaaggtgattgctgtgccattttaacgattccagcaattgttttttcttgtaattttctattagtaaacttccgcgttacatgttccttttcataaacatccttaaaattcatttttcctcaattcctttttgcttatataataacaatctatattttattatagtaaaaaactgttaaaaagcttaattattgctcttttcttgctttttcttttctgctgcctgtttttttaaataagcactcattgcaagatcattttttcgcatagcaataaacgcagtaatggttaaagttaatccgccaagacaaatcacaagtaagccaatcggaaacaagaagtctgctcccttaggaataaatgatgccttaattacccagcatgctataccaattaacatcaaaactatacccacaatgactgccttagtgttcggtcgatatcttttcataaatgcccttctttcttaattaacattctaacagaaaaagcttagcttcaacgtagaagctaagccgaaaactagagaaatagtcgttaaatttttacatgagagaggggaaagttgactatttaagttcgatagtttgtactttttgggaatgttcaacactgcctttttcaatcggagtaactgacttaatcaggtccatgttggtgtagacaacgatgcagctgtcatcgtatcccttgtctgtaatcatttggaaatccattgtggctaagggttgacctttcttaactttatcgccttgactaacattcactgtaaacggagcaccttttagttcaacagtatcaagacccaagtgaatcaaaaactcaataccttggtcattcgtgataccaatagcatgtttagttgggaagagtgtggaaatactaccatcaactggtgcatagatatgattatccttaggcttgatagcatagccatcacctaacatcttagttgagaagacatcgtcttttacatcagtaattggcataatgtcgccgtcaactaccgcatctacttcaatacccttattctttttcttaaagaaattaaacataattaataacctctggatttctaaaattcaagtaataatatcaacataaagcttgcgagtaataaaccagctgcagtaagtgaaattgcgattattactcgactaacgccatcttgtgtcttcttcaaagctcttgctcgataaaaacctaagatagctaatactacgcaaagcaagttgccaacaaagagctgagcaatcatctgacttcccatcaagaagcgataagtctgtcgattgattaaaaactgcttgtggtttaacaacatatagtagcctagtatgaagtcaacgatagcaacgattgtactaatcgcaatcatcggctgcttcataatcatcatccgaatcgattgaccagaagcaccgcttcgtagtgcaatcatcgcccaaaacaatagtggagcaatgaaaagtacgtatgaataccaagtcaaaatcttcttagtatccaagtgcatgctttcggttattcgatcgataaagttgccaacttttcgtttactaattgcccacattgatctctacatcctctccttgactctgttgccaagctacatattcactaattaccaaatcaattaagaagtacgctggggtaaaggcaaccttcccgctcttaaagtcggcatcatcagtaaaggcaatcgttggaaaataaatgttgtgctgcactaatgaagctaatttattttgcttcaggttagtgaacgaaacatatttgaatttatcattcactagttccaacttagtgatttcctcattgatcgttttattatcacccgtaaacgagataataaacaaaacatcgcctttttgagcaaagcgtcccgcagcttttaactcctctaatgctgatggcaaaacagttgcatgcttgccaactacaaacaattcatgagccaaatattgtgcgattaactcttgttgccaaccagtagagtaaatgtaaattgtccctgcattatctaaatcgcgatacaagctattgaaatcacgttgtttgaaatacttcaacacgtctgaatttactttactaagttcccgcgcaaaattattttcaattttgattggtttttgcttcgattcggctaattcgaccaaatcaaatttaagctcactgtagccacttagtcctagctttttacataaccggaaaattgcggattcggatacataaagctttttagctaatttggctaagcttaatttgctacagtctctcggattatttagaacatattgaactatctgtttttcagaatcattcaacttatgactattgtcatagaccattgatctcaaatttgccataatacctgtgcccttatcaatatataatttatatattaatgataacacaagcgctttcagattatagcaattgtttcatttgatcaacaacttgatcggcatccaatccgacaacgatgtcaacctcgttgttatctttatgttgtacttcgtaagaatctgcgatcttcttgaattctgaatctggagcgaccttcttaggatcaacgacatgagttcttactctagttgagcaagcaatgacatcttgaatgttggagtcaccaccaagcaagtcaacgataccagtagctctttcaatataaggattatcttgttcagttgataccttagcgtcgccaccttgttgttgcattaaagtgttcatttcatcaagaacttgaggtacgtccaaacctacgataacttggatagccttaccgtggtgtacgacattgacagccttgtttgctttaaatgcggcatctgaagcaactttatttggatcggcaacagatacacgtaatctagtagcacatgaactcaattctgtaatgtttgaaggaccacctaataattcaaggtaagcagttgctctttcaatgtaagggtcattagcgtccttaccagcagcttctgcagccttcttagccttgtattctttctttgaaagaaggtgaacatcttgatcatcggcttcacgacctggagtaatgtaattgaacttctcgatcatgatcttgaagacaaagtaagtaataataccgaagataataccaacgataaattccatcacataggtcttccagtggtttggccaaagtggaatccagttcattgaagcgataccgatcgcaccatctgacatgaatcctcttaaaccaaaggcccacataactgtgttcatcgtggctgacaatactgagtaaactacccaaagaactggagcagcaaacaaataagtaaagtcgataggttcagtaataccagctaatactgaggttaaagcagctgggataagcaaagctgaagtttgcttcttcttgttcttcttagcagttgcgtagaaggcaagacagataaatggtactaagaataccttttcgttaccgtaaagttggaatccttcaactgaagcgatttgtgaaagtggtttagtacttgcagcgtattcagcaaggtgtttcaaccagtatggttgcaaaccgccggcaacaacggctggaccgaattggaatggaatgtataccaagtggtgaagaccagtaggaatcaatacacggttcaagaattggtaaatccaaacaccgataaatccactatctacgatgaagtgttgcatgctggtgatacccatttgaacttttggccagccccagcaggtaatgagtgctaaaggaatcattacgaagaatgctaaagcgtagacataagttgaaccttggaaagtaccaagccagtctggcaacttcttatcaaagtacttattgtgtaaccacactacaataagagcaacaaccaaggcacctaagatactagtgtcaagagtcttgataccagcaatgttagttaaaccatggttagtagcgttagcaacaatttggatcttgtcaaagttaggaataccaaaagctgcaccccagtgggtaagcattgcaccgatgaagtagttgtaagtcaagtaagcaataactgcttccatggctgctctacctctagccttgttggctaaaccgattggcaaacctacagtaaacaaaataccttcttggttgaacactgtccaaccaccagctgaaattgtgtcccaaactgagttccatgtagttcccgggttggcaattaaaccaaacagagtcgggttattgaacaaactacctaaagctacgacaatacccgcaaacgagaacagcataactgggacgaacatagcggccccaaaccgctgtattttctgcatcataatcgtttacctctgaagaaaaaaattaaatcaataacttattcttacatctacacctgcatctacatctttatttcatcagatcaagtcaaccgcaaggtgctcatacaattgacttttgccatttgtgcttcacacaaatatttactcctcaaaaatgttttaagataaaacgtccagttgatatcaaattctgaacttaactctatcttagtagctagcttacatttttatttataccatagttttaagctaatgtaagcgtttttaaaactatgacttattgtttcataaagttaagatgatatttcatttcatgaaatttatttcagcccttcaatgatgtatataccaatatttatacccctttattttgcttgtcgcgcctatgtttaatcatttactttacatacaaaaataacatgtcaataaatatgctatagacattctctatttatacacataaaatcctctgaaatatatttcatttcatgaaacgaaacaagtgataaaacctttttcctttccaagatgaactactttgcttactgaaataacacaaagtctggcataattaacggtaagttaaatgcacaggaggaattattatgacaatcaaatttattgcacttgataccgacggtaccttgcttaattcaacaggtaagattttgcccagtacaaaaaaggcagttaaaacagctttagaccaaggaataaaagttgctttatgttctggtcggccaatcgcaggattaaaacattttatggacgaattaggaattattggacctaatcaatatgctatcactcttaatggcgcaattacccgcacagcagatggcaagataatgactaaagatctagtttctaatcgactttatcgtaaaatgtatgcttttgctaacgagcatcatttaccttttaacgttgtttcccctgattcaaaaataattacaggagatcatgatgttgatttaatggtttatactcaagcttacgaaaatagtgcgactttatacattagagagctagatgaattgcctagtgattttgaaattgctaaaggttgttttgccactaaagctaagttgttagaccaatgggaggataaaattcgccaagaatttgggcaagagctgtatattgttcgtgccgacgattgcttcttagagctacttcaccctaatgttaataaaggaaccggattaaaagaattaactgaaaaacttggcattactccagaagaggtcatggcaattggagacgaaagaaatgatattaccatgtttgactttgctggaacagctgtttgcatgggtaatggctccgaagaagcgaaaaagcatgctgattatgttaccacttcaaatgacgaagatggcatcagcaatgcttttgagaaatttttatgaacaacctaaaacaagtatctgagaagtgattaatctttcctagatacttgttttattatttgttcaaatattcacgcaaagctggcaaaactttctccgcctcaactcgtccgacctcatacactcgtcgcatctcttttttatctgtttctaaagtgccaatttcaagcggaaacggtggacgaataataaaagcttggtcagcagcttcatcttttaccatctgatcaagcaccgcattataatcctcagctttagtagccaatttttttactactgcggggtatttccttaaaattactttttccagtggatagagcttactctgctttttgcgataagacttcggctgtgtagcaatgactacctttttatcacagttttgctgctctaaaaaatcatacggaattgaatcagatacaccgccatcaaagtaataatgcccatgaattgcaactggatgagcaaaaaatggaatcgacgacgaggctctaatccactctaagtcaacataacctgcatcatgtaattgatgataaaccggctcacctgttgcagcatcagttgcaacacaccaaaagtccattggattagtcataaatttttctttatcaaaaacatccaacttatcaggcaaaatatggtaacaaaagttagccgcatacaaattgcctgaccgccgccatgatttccaactagcataatatggtttccccgcaaagcgcatgttgtagcgcaatactcttcccttttgctccgacttcaagtttacgccaaaggcagcaccggctgaaacgccaattgctaaatcaaaggttatgtcattttctaaaaacacatcaattacgccagctgtaaacagcccacgcattgctccaccttcaagtactaacccacttttcatattttccctctttatcaaaaaagacctacgcttttcgcataggtctaatttattcttattttaattttacttcaagcccgaccattgccattcggttacttctggcatgtctttaccattgtcgcggatgtattggtggtgcttttcaagcaagtaatccatgtgactgatgaagtccgcattcttgcccttcaaagctgggatgctttctacggcatccttagctaggtcaaagcgatcaagatgattcaatacccgcatgtcaaatggggtagtaatatcaccattttcttcatagcagtgaatatgaacattgtaacgcttgcgagcaaaccaaatggattccatcatgctcttgtagccatgccatgcaaagattactggtacatccttagggaataatctgtcaaattcttcagttgacaagccattcttgttgtcctttggatccattaacttcataacatcaactacgttaatgtagcgaatcttgagatctgggaacttcttatgcaaaatatcaattgcggccaaagtttcaatagttggctcagtttcagttgaagcaaagacaacatccggcttagcacccttatcagttgaagcccagtcaatgtagcttaagcccttgtcaaccaacttttgtgcttcttcaattgagaaccattgtggacgagcctgcttagaagttaccaaaacattgatgcattctctatctttcaaggccttgtcgccaactgccaaaagcgtattagtgtctgatggcaagtactcatgaacaaggtctggacgattcttttcatataagtgagtcaagatgcctgggtcttggtgagtgtaaccattgtggtcttgttggaagacagttgaggttgcgacaaagttaagtgatggatagtcatgacgccagtattgttccttagcttttcttaaccacttcatgtgttgggtaagcattgaatcaactacacggccaaaggcttcgtaagtagcgaagaagccatgacggccagtcaaaacatagccttcaaggaatccttcatcttggtgttctgacaattgtgaatcaattacacgaccacttggagctaggttttcatcattaggttcatgaatttctggttcccattgacgcttttgatcatcaagaagtgcaaacaaacggtttgacttagattcatccggaccaaagccacggaatgtgtctgggttaagatcagcaacttcgctaaggtatttagcccattcaaccatatcttgtgcttccatttgacctggcttaaacttcaatgcgtacttgcggtaatctggcaagttcaaacgcttagggttcttaccaccattagtaactggattcatggccattctgtggtcacccttagccgtattttcagtaacgatcttcttaggtgaaccatcttcattgaataattcttctggcttgtagctcttaagccatttttcaagcatttccttatgttccatatcatcttgtgcaactggaattggaatttggtgagcacggaagctgttctcaattgggttgccatccaagtccttctttggaccagtccagcccttagggcattggaagataatcattggccagtgtggcaaagtagcgtcattgttttcacgggcgtgcttttgaatagccttgatttcttcaatgacttcatccatggtcttagccatttcttcgtgaacctgcattgggtccttttcaccgtcaaaacgaccacccttaaagactgaaacaaagtgaggatcccagcccatgccacggaagtattcggttaattcttgatcgctcatgcgagaaacaatggttgggttagaaatcttaaagccgttgatttgcaagattggcagaactgcaccatctttaattgggttaatgaacttgtcactaaaccatgaagcagctaagggaccagtttcagcttcaccatcaccaatttcaacagcggcaataacatctggattatccaaaacagcaccagtaccgtgtgacagtgagtagcctaattccccaccttcatgaattgaacctggagtttcaggagcagcgtgagaagcaacaccgcctgggaaactgaagcgtttgaatagcttagccatccccttttggtcctgggtaatctctgggtaacgttcagtatatgaaccatcaagatatgagttagaaaccattacctgaccaccgtgacctgaaccctcaatatagaacatgttcaagtcatacttcttaagcacacgattcaagtgagcataaataaagttctgtggtgcaatagtgccccagtgaccaattggcttaggcttaacgtcttctgcaaccaatggggtcttaagaagagggttcttcatcaagaacaactgaccaactgacaagtagttggctgcgcgccaataagcatcaacgctctttaaatagtcttttgagtcataatcaactgccatcttattctcctttgagcatctaagagtgctctttttcatttgttcttttgtttacacttatatcataccaaattatctaaaaagttcaactatttttataattggatcctaccaattaaaaaataagtatttaatttaaaattgcatcccttttttgttgctatatcaaccttttaatgctttgatataagtatttagttgcttaaatactgataagtacagataaacaaatatcaaatactgacataatcagtgcaaaattattcattcatgttagattactaaatggagggcatgagatgacccaagaagaaagattaatacaaattaaacagttacttaaaaaaaagcaccaattatcaactagacagattgcagctcacttcaatgtatcatttgatacggcaagacgagatgtaattcatctaactgaaactggtcaagcaattagagttcatggtggtttgatggaaattaattgcaacagcgtacctgattttttagcaagaaatcaagtacaatcaccggttaagatgaaaatggctagaatggcaaagagatttgttcatccaggtcaatgtgatttcatcggttcatcaactacgttaaagcagctctgtccaatgcttaatggtattgacatgcagatcgtcacgaattcaatcgacaacgcattaagcttattagcaatagaaatcccatcagtcagattgttgggcggcgttatcaacaaaaagcagcgtttcatttattctgaaacagcattagaaacattgcgtcaaatccatttcaatactgcatttattggtggatctcgaatcagagatgacggcgtatatacaccaagcatggctgattccaaaattgtcgaaaccgccgctagtcgcgctaatcaagttgtattagttgccgaaaaatataaatttactaatcaatcctcttcgccatacatgtctgtccccctcaatcagatcgatgtccttattaccgacaccccattgcctgaggaattaaagcatcattttaatccaaaaacgcaaattatacctgttttaaaggagtgatagttatgttcagtctctttaaccaaaagaaacaaagcgaaagtcgtgaagtataccaagatttgaagaatttttataatagtttttttagcaatatctacaatgaaatgaatattggtcgctatcggcagattcgcgatgcaattgggcttgttcttaataagttcgacagtggtgatcatcctcttgaatacactagcaaattggtcatgtatattcaggctcgaattgccatgaatcacctgcatctaactcatgaacagcaagacctaatgaaaaagctaagtgacgctaccaaatatgtaaatctttcttatgtttatctgagtccgctcacttcggtagaacaatttgttaatatttaagtgtatctagaacctgctctagatgaaaaaatgaatccaaaaagaccgagtagctgatctgctcggcctttttatgcaataatattgttaaaagatatagattttttcaaaggaaataattatgacaaaattaccattcaaagttgttgctgtcgatatggatggcactttcatgcatgatgatcaaactttcgatcacaagcgctttgaccgcatcttaacagaattacacaaaaaggggattcactttatcgtttcaagtgggcgcccttataccagattacgcaaagattttgctggctttttaaaccgaatcgacatgattgctgacaatggctcgcttttgcttcaagataatcaaattattagcactcatttgctcacttataaaacaaccttagatctaataagttttatcaaagagcattattccaagagttcaattattgtcactgggatcaacaattcatatacaactattaatgcttctcctagttttaagcagacgatgaacttctattaccccgatcgaattgaagttactgatttagcagcggctatcaatccgcaggatatgattactaaaatcaccttaagttatcaatatgatttttccgcggaattagaaaaagaattcaaccaaacccatgccgagaagattcactgtacttctagtggtttcggtttgcttgatattgtgccttacagcgttaataaagggagcgctctaaaatacttcttacgctattttggtgctaaacccaatgaattaattgcctttggcgacggaatgaatgatgctgagatgttaaaactagccggttacagttatgcgatggctaatgcagaagatcaagttaagaaaatcgccaagtatgaggccccgagtaacaatgatgatggggttttagaggtgcttgattcatatttagctaaagtagagaaataataattactgtaaactaaaaccgtctgaatgagcaaaataaaaaagtagccaagttttcttaaactaattgacttaagaaaacacagctactttttatttacccaaattaacaaaggtattaaagttcatataatgataatgcacgcgcatatttgatacttcaaacggcgtcccatcatccaagaagaagatcccttccattacaccaacaggttcagtcggcttcaaatttagcttctgctgatcttcttcattcgatggttcaacagtgatattcaagaatgacttagtaacggtctttccctgttcatcttccaaatagttaaacaaagacttttgtaaagtctctggctttaattccggcacaattttaatcggcaaatatccagtctcaattaaaaatggttgttcatctaacagtcgcagacgcttgaattcataaacaaaatcattttcatttaaaaataagtcttccgcaatttctttagttgccttaatcacatgaaaatcaagcaacttaatttgttgttttttaccagggactttaaaagaatcagtgattccaagattcgatccatcataacgaaacattgcctgtttgcgcaaatatagtggattaataaaagttccactacctcgctttttaaaaacgatcccttgttgagccaacagctccagcgcacgcttcattgatgatcgacttacctgatagtgttcggctagactgcgttcatcaggcagtcgcatccccttatactgattattcaaaatattctgtttaatgtcatgcataactgtccgataaacataatctgccattattctcgtccttgatctgcctttttaatactatcaataaaccaagttgcaaacttatccaagtccacatctgtcgcaatctccgcattggcatgttcttggtccataaaatccattacgctggcaccataagtatattgcccgcgcaattcaatattcacatttgcctttttcattgtaaacatttccggatgaagcataattccaactgcagtcggatcataaatcttaattcgcggatcaccgtctggttcatgaatgttagagaaaagtgaatacaacatattacccacttcaccacatgtcttaactttatccatttgctctggtgttaaatgggccttatttccaatttcaagtggagcaaccttaactagcaatccactatgaaaaactacctgcgctgcttccggatctcccgcaatattatattccgcaaatgggctatgatttccgtgaccaatattaccacccataattacaatttccgcaatattttctttaacttcaggatattgcttaaaaagtaaggcaaagtcagttaatggtccaatgcccatcagagttattttttctggactacttttaatttccttagccatcaacgttgcagcaagaccaggttcaattaaagaatcatcagcttgttcaaattcaaagccggcaatccctgttttaccatgaaccgaagcagcactaatcattggtgccaccagtggttgattagcacccactacgacaggaaccttagtatgcaaaaacttttctaaatttaaggtattttgcaaggtatatttcagtgccacgttaccccaagtaggcacaatcatgcgcacatcaagttcttgtgcaaaaagactaatcgtcatggcagcaatgtcatcaatgccaggatcagtactgataattaaaggtttcttgttcataaaattatcctctcgtattaagtacttttataatagcaaaaaaccaaccaattaagaaagtggttggttttattctaataattatttttcttttttgggtttaatacgttgaatgtgttcttcttcatggtcacctaatactaatggcacacgctcaaccacagtatcggcatactccagtccgaaccaagatgcagggttagaagataaattctgcagccatactcttgcttcaaccatgaacttttcatagcctgtcaatttagttaatggactaattacgtcgttaacaattacaaaggcgaagtcccctacatcacgacccggtgtagtagtgaattgttgtggttgagcttcaatcgttccatcagcgatcaaatcatgaacaatttgccgcaaataaacatttacactggtttgttttctaaaacctaaatacaactgaacgttaattacattcttagtaccataagtattgaccgcgtattctgcagtatatggctcgttagtaacattaacagttacaaaccagtaagccttagcccgtttaggtctcttatccaaaattgaataaagcatttcgcgcttaatgaatttattatacttaaccttagccatataaactacattcgtagcgtaaactggataatcatcacagtggctcaactcagtcaacatatctgtatattcatctaagcgaacataagcattctgctcctcacgcttatcacggatcttattgccatagaaccacacgtacatgattgccaaaataaaaccagcaattaaaacagtgacgtaaccgccatgcaaaaacttagttaagcttgagaataagaacatcccttcaataaaggcaaagactactaagaaaatgcatcgtattgatagcgcggtaccttttttacccagatattcaaataataagatagttgtcatcaacatggtaaccgtgatggccagaccatatgctgcttccatatgatgtgaagttctaaataagaaaacaattgcaactgtaatgacacagatcatcttattaattgaaggaatataaatctgtcccttctcatttgaaggatagataatattcattcttggtaaaaattttaaactacttgcttcagctactaaagtgaatgaacccgtaatcaaagcctgagaagcaataatagcggcaatcgtagccaaagcaatagcaaacaatcttagactacttggtactgcttcaaaaaatggattgaaatcaccattaccagcatgataattagcattttgtaaaatccagacgccttgccctaaatagtttaaaatcaagcaaacaaacacataaggccaagagcccataatattacttttcccgacatgtccgacatctgaataaagagcctcagcaccagtagttgccaagaaaattgaacctaaaatcaaaatacccactttattagcaggactaaataaaatacgcaaagcatgaattggattaattgcatcaagcaaactccaatcatggcttaagttcataaatccaatgagccctaaaaaagtaaaccacaggagcatgattggaccaaaggccttaccaatcacactcgttcccattctttgaattgaaaatagtaaaaccaggataacaatagtaatcaagataaccatatcttgcgacgaaactggaattacatcaccaaagcgcatatttttcaatccttcaattgaagttgtaacagtcacagctggagttaatgtcccatcagctaacaatgctgctccaccaattaaagctgggataactagccatttagccctctttctaaccaatgcataaagagagaagatccctccttcaccatgattagtcgccttcaaggcaattatcacatatttgaccgttgtcaataatgtaacagtccaaaaaatcaacgaaatggagccaacaattagttcacggttaacattactaatcccaccattttcagtcacaatcgacttcataacatacaaaggactagtaccaatatcaccatagacaataccgatagcaattaaaaggccagtaaaagacaccttttgcttaccagatattttattcataagtttttatcctctatttcacttaaaaattgaaatttttactagtatagaaaaagtctagattttttgcaataaaaatatatctttttgaaaaataaaaaagaagatgaaatctccttcagtcacttaatttactttttcttatcttcgatggtgccatcactatgagcaataattacttcgtcacacatatccaggaacaagccatgttcaactacgccaacagtatgatcaaggtaatcagctaaaccatgaggtgctggaacaggatctgcagccaaatcaataatataatttccatagtgagtcacataacgttgattgccatccatacgccaccgaggctttaatccttcttgttcaaaacgtttaaagttttgttcacaagaaattggtaaaacttcaactggtaatgggaagccgcttaaacgatgcactaattttgattcatcaacgatccaaatgatcttcttagaattgattgctacatttttttctaaagttaatgcaccaccgccgcctttgattccatccaagttatcggtaacccgatcagcaccatctacagttaaatcagcttgatcaatatcggccaattcactaactttaaagcctaagccctcaagttgttttttactacggttactagtagttacgatagccttcagttttaagccgtcttcatctttgcgcttacctaaagcatcaatgaaaaaggcaacggttgaacctgtaccaacgcccaataccatacctgatttaaccatggcagctgctttttctgctgcttcttttttcaaacgatcttgttcttgcttgttcattattcatcatcctccatcgcctgtttaacttcctgttcagttggaattgaaggctgagcacctaaacgttgtacggcaattgaagatgcacgacttgcaattttagctgcttcttcaaagttagataggccagaatttaaattgcttaccaaatatccaataaaggtatctcctgcaccagtagtatcggctgcttcaactttataagtcggtattaattcttcaacatcgggagttgaaatatacgcacccttatcaccataggtaataaccacgttttttacaccaagcatgtgtagtttttctgcattagtggccagcgttgaattatctttaattgcaatgccagtgatcttggcactttcagtttcattcggtgtaatgatatcagtatattgcagtaattctttaggaatctcatcaactgcaggagctggatttaaaatagtgatttttttggcctttttagcaatcttaaatgcttcaagcgtcacatctagtgggatttcgaattgagcaattacacaatcccaactcttaatcaaatcaccagctgcacggatatcttccactgtcagttcataatttgcgccgtgatcaataatgatgtcattttgcccagcttcattcaacgtgatataagcatggcctgtctttgctcccattgtggtttgcacataagttgtgtccacgccataactcttgagctgatgcgtgataaaatttccttcactatcttcacctacacggttaataaagtaagtttcagctccacttttagcagctgcaattgcctgattagcacccttaccgccaccagcagtagtaatgtctagcgcattaattgtttcaccaggcttaggaaagtcttttacatgtaatgttgtatcaacattacttgaaccaataactacaatcttcttcattatgagcatcctcttctaaaaatggatttattcaacctcaattataacaaaaaacgtattcaaaatattgaacacacatttttgaaatcttactgtaaaataccaccattaacgaagccttttaagcgctcagcttcccacttcaatgtatctgaatcgtcaacttgcgagatcttatacccaacgaaatatggtgaagcatagaatcgtggaataatcttgcaacaagtaccttgaccatcattaattggatagaaaaataagttataagaatcaacaccatgtgacaagactgaacgcacatattgtgtgcccttttgaatcaaatcggcccaagtatccaaattagtattatcatgtgtcaaaatatttacttcttggtagccttgaactggacgcgctgataagttcatttcaactgaacccgaacgcccgacttcaaatcctttaaagttatcagcgccaatatcgtgatagccatctttatgatataagcccacgatctgcatatgtggatgagttaaagaaccatcagacttgggaccaaaatttttataccaaagcacactctgataacggcctgaattattcattttttgaaaacacttcaagccaaacttcatcaactcttgattatcttcacgcgtataagttgaaatatctccctggtgatcacttgattcaattaaaattgtttgattagtatcctttaacgtagggtacttattcttcaaccaaatcttatcgccatctttttcataaatattaattagatgctgcacatcacaaaaaggacagccagcattctgatttccttgccgattaccataatcataatcatatggcttacgcttaccaattgaatattcatacactaaaggattcttgtccatatttttcacctgctaaaccaaagatatcatacatttaacatcattttaacaattttatcggttaattgtgaacatttttattaacctgaattgtcaaattaagtgcaacagttaggctatgaggaaatatattgcttgaagagttcttctgctgtgtgatattggaggattcggcgatatttgtggttaatggcatcagttgcctgttgaacataagcttttgacttgtctttcatgctcttgcccttagggaagaattgacgcaaaagaccattgcagttttcattggtgcccctttcccatggagaatatgggtgagcaaagtaaatctggcagcccttgatcttggtcatatccgcaaactcagagccattgtcaaacgtgattgatttaaaccaggcaggatgtctgtcaatctccttttgaagcagcctttggcatgtgcttgcccgatagtcaggaatcttgataactacttcaaagcgtgtggttctttcagtcaaagtcattaaagcaggctgattcttgcgtctgacgcctttaaccagatctccttcccagtgcagcggagcttttctgtcttcaatctctttaggacgctgttcaatggaattgccaagatgcttcttgtgcaaagcgtgaccgccatggctgtgatgacgcttgttcctgcgtcttttgagcttcataggcagatcaatattgcttatgtccagcaagccctgatcaatatagcgatagacagttggtgtgctgggacaagggtagcctggcatagtccttttgaattcaccaacgaactcatcgatgctggtggcatcaaatttagctttaaagcgtctggagagcattctcaaaaagacagcataatgcttcaatggattgcgctgatagcagtttttgcgacgcttctcataataaatctgtgcagtatcagcgtaatagtgctcatacaataaatagctgctgtctctttgcaggacgcttccgcgtttgatttcgcgactgattgtcgacttatggcagccaacttcttgagcgataacagtacgggaagttatgccggaatccagcattgcttgaatttgtccacgttgtacgctggttaattgatgatagtgcttagaaatgctagaatttgaattggtcataaagatcttcctttcttgatttttcgtcacttcaagtttaggtcttcatggcctttttgtttaacacttagtgttgcacttcaattttaaatccgggacatttttattaataaagctaggaatagtacgtctatctatgataaactacctttgtaaaagaaatacatgatatacatgagaggaagaatcatgaaattctataaaaaattggtacttactggtgccgcagctttagctgttctaggcttgagtgcatgttcaaataataattctagttcatcttcatctaataagaagattccaactaagattaacaagaagactaccgttaccttttggtattcactaactggtaatgcgcaaagcagtttgcaaaaattgactaaagattttgaaaagaaaaatcctaacattactatcaagttgcaaagccaaggcggcaactactctgatttacaatctaagttggtttcaggtttgcaatcgccaaaggatttaccgacaattactcaagcttatcctggctggctttacaatgctgccaagaacaatatgcttgttaacctaaccccatacattaacaattctgaaattggctggggctcatatgctaagagtggcattaagaaagctctttgggatggtgcaaacatcaacggtacacaatatggtgttcctttcaacaagtcagttgaagtacttttctacaataagaccttacttgataagtatgatgttaaagtcccaactaacatgagtgaattggcttctgcatccgcaaaaatttaccgtgaaagtcaccacaaagtacgcggtgttggatttgatgctttaaacaattactacatgatgcaaatgaaggaaacttacggcaaagacttcaataagaacttaaactttgctgccaaggattccgttaaagccatcaactactacgctaatggagtaagagccggctacttcatgcaagctggtactgaaaagtacatgtcaactccattcaacaatggtcgcgttgctatgttcatcggttcaactgccaatgaagcttaccttaagcaaggacttaagaagggttacacttatggtgtagctgctcgtccaagcacgatgaacgtacaacaaggtactgacatttatatgttcaaaaaagcaaccgcaatgcaaaagtcagctgcgtttaagtaccttaagttcttaacttctaagtcatcacaactttactgggctaaacaaacaggctacatgccagttaatactgctgctatcaacgacaaggtttaccaatctgccaagaacagcaagataccagcaattattgccaagacctctaagaacctttacttcttaccagtaactaagaatgctactgccgcatatgatcaagttaatgctaacatgcaaaccattttagctaaggcaagtaaaaagcaatcatggaatagcgatatcaagactggtaaagataagcttgatgctgcttggaagcaataatttttcaaataaaatatctatcaaaaaaagaagttcagtattaattgaacttcttttttttacctaattatttactaaaaatggatattgaatttgatcattatcagttacattcaacttgtaacgagcacgatataaagccttttctaccgctaattgccctgcagttgtggccattgcaatcgaatatgacttgtgtggtgaattgatcaggatttgactgatagaatgcttaatgtatgactggattagaatgacataattcgattccttacatgcacgtaaaacattagaagcctgtttcatctcgataattcgagctactccattgtgtgcttcaatcaccttagccaagttagaggttaagctcttgtctcctactacaacggtaactcgttttttatcgaggtcaaaatcaattcgggaagcatagtcttcattttgcttttcagacgactgcttctcctttttttctaattgatgcaataaagacttgtgtctacctttagtcttgtgcttttccgtttctttatttttatccggcttttccttcttttctggaatagtaacttcagcttcggcataacgccatctaaccctaatgaaggatggatcactgactcgccaaacaatactaatcaggtcattttcgtgtaagttaaagtgacttacagtattcatgtctaagtataaaatagctttttcaggatttacttgacttaggtttttgccattagagtcctgcttgatgtataaaccaaaagaatcacggtgaactaccgctggaccaaattcgataatttcctcatctggcgcaaaagactttgcatgatgctcaactttaataattggacgattgccactgtcatttaagtgatctagcaaagtaactgtatcaccgttttccagcttttcaattctagtcaagtgttcattaaaatattgtactgaatgaccattctcatccactgcttctgcacctagcagcttacgcctaatctcatattgtttttcctttggtttagccacaggaattattttcttaaccacaggcttaggaataggagttatggtcgcatatttgtttttattctttaaaaccgtaggactcagagctttagcagcttcttcttttttagctttttctttttcaagctcttccttcgtttttttcggctttattttttctacagtattttcatcattttcttttttagtttctatttcagttttattttctagcttattctcagtttttatttctggctcattttttacagcctgatcagctttttccgcaattttaacgacttcattcttattctcaggtggattgcctagtactgcctggttatatattttactaataattttcaacgcaatcattgactgcttcagtgattggggatcgctccccgtcgcctgcattaaatcaataatatcttttctataatcaatcgtcatatatttaccttcttatttcttaaatatgaatattatacaaaaatttttaatgctaatctaattctttatagatttttatattatttttcctgtaaaaccattataataaaagtagttaaaatatcatttattaaatgagggagactactatgaaaaagaaacttttacttttcgtatcctttttagccggtttattgttcttggtatctacaccaacttatgctagcaagcttcctaaaggctatggtattgctaaaacctttaccacaccaaaagcaacccgtggcacctggtattatcgcgaaaagggtgataaaacaatttctaaggtaaagatcactgctcatagcgtagatggtaaaaagctttacgtaccttcacaaaagttcttcgagaaaaatgtttacaacgtttcagctaagaagcgtaatcagttcatcaaaaaaactgaaaatatttatgctgcagctaactataaaaagggcttcaatgtcaacaattgggttaacttagctggtgatggtgaatactacatccctgttactagaactgttaacggcaaaaaggttaaggcattaagaatagctactggtgctggtccttatactgctgcatatgcatacaaaactaaggcattggttaaataatcattgtctaacgaaaaagcaaattagcataatttgcttttttcttttaccgatttttacttttccgtatttctccttcaaaaagagcggtcaattttgccaaactcttatgatcaggatagcgttgaactaattgctcaattttatcggtagctaatttttttacttcttcggctgagcccattttctctaaaaaatctgccaaatcacctgaacgagcaagtaacttacgctcactacgactttctgccagaaaagcttgatcaaccttacgtaacttcaaactaccatctgcattaaagtgatatcctccccacatatgctgcttaattggttgcatcggttcgctatccacataacacaattttcctaccatatggtgcgtctcagtaattcctaacgtaaccgggtcataaatatcgacatagttaaaaattttctcccgcattttagccacctgacgtcgttctgttggcgttaataaaagccaaatattggttccttcatacagataagcagctgcaattgcttctggatgacgacaattagctaaagcaaactgagcattaattgaacctaacgaatgaccataaatataaattctactacctttaaattgattaattgtctgattcaataagtgagcagctgactttaattggctaggaatcgtccgttttcgtgcaagcagtgcttttaaaattggtagattagttttaatccattcatcacgccaagtttgtggagtcccctttttaaaaccatatgatcctttaaataagattgttatttcattcggacttgaaatgacgaaggctcgcatcccatccttagcataaacattacgacaaacagttccaagataatgttgatctattttgatagtatcacccagctgcaattcatcatatgtctttttagttaattcaactcgttcacgatctgttaactgtgcatttacactcataatttttcctaaaataaaaaactaactcttactattatgttagcatgagttagttttttgggataatttgagcctttaatcatattttttctgcaagtaatttgcaatcgttgacaagcagaaacagacaataaagtacatgattgcaataatcacatacattggaattaagtaagtcgtgttctgactgtaaataatttgtgcgtggtataaaagctctggcaaaacaatgatagttgccaatgaagtatccttaaccaatgatacaaattgtgataataatgccggaatcatattgtgcaaagcttgtggcataattacatgatacatagcctgaccatacgacatcccgttggaacgggcaccttccatttgacccgaatcaactgagccaattcctgaacgaacaatttctgctagcattgcaccttcaaagatgactaacgctgcaattgaagctgtcgttggattcgttacaatacctaattgaggtaaaccaaaataggtaaagaagatgatcaacaatagcggcaagtttcgaataatatcaataataaagcctacaattgcagacacatacttaattttcatgtagcgaactaatcctaagattaatcctactacgaagcttaatgcaattgaaattaatgaaacataaatcgttacccaaagtccttgtaataagaagcgaatatcgacccatgaatatgcatgaataaaagtttccattctctatccccttcctattagctgactaattttttctctaaatgacgcatgtagtaactaagcggcaaagtcaagatcaagtagaacaatccaacaataatataagtatcaattgtttggaacgttgagaacgcaatcaattgtgcttgatacatcaagtcaaaaccggcaacaaaggccaaaactgaagagtttttaaccaagttgacaaactggttgcctagtggtggaatcactatcttcatcgcttgaggtaagatgacataacgcatggcttgcacataggtcataccgttggagcgagcaccttccatttgaccagttccaattgaattaattcccgcacgaacagtctctgcaataaacgctgatgtataaagcgttaaaccaattgtccccgcttgaaatcctgacaatttcacaatataacgtggaacgatcaaataaaagatcatgacaattaccagcaaaggtatatttctaaaaatcgcaatatagatcttcgcgatcacttggccaaatttagatggtgctacctcaagcaaggcaaaaatcacgcctaaaatcaaactgaaaactagagcaataatactacttaaaatagtattccaaaaacctgttaggaagctgccccagttgttagtaataatttgccacattatttcaaaaccccctttagactaaaaccaggaattccagcaaaccactttttaatcaaacggtcataagtaccattcttttgtaattcattcaaagcttggtcgatatgatcagccatttgtttttgtcccttattaacagcaattccgtaaggagcattactatagacgccgccgactaacttataaccaggattttcttgagcgataccggcaagcaagccgttgtcagtagttaatgccacaccttggttagccttcaatgcagacattgcttgaccatagtcatcatattgcaaaatccgcgctttaggggcatacttatgtacatcatcaactgcggtagttcctttaacggccaaaacagttttgccttccagatccttaacattcttgatcttactattattaggcactaacaaagatgaaccggctggaaagtatggcttagagaaggttacttgcttggcacgttctggtgtaatagtcattgtggctaaaacagcatcaacatttccattttttaaaagtgggattctagtgttggcagtagtagtaacaaaatcggttttagcatctttacctagcatttgcttagttaaagccttagccaaatcgatttcaaacccttcaatatgtcctgtcttaatgttcgttaagccaaacaatctagtatctgctctaacgccccaaacaattgtcttactttcttttactttttgataaacattattgctagcatgcttgccacaagcagtcaaggcaagtgccaagattagcaataagggaaagaaaaaaaatctttttaattttttcatggcgtgccaccttaatctttagaaatgatcttgcttaagaattgacgtgcacgttcagtatctggatgagcaaagaattcttctggcttgcgatcttctaaaatatgacctttatcaaagaaaattaagcgattgcttacttctctagcaaaacccatttcgtgggtaaccacaaccatagtaatgccttgttcagcaacatatctcataacttctaaaacatcttcaatcatttctgggtcaagggcactagttggttcatcaaataaaatcaccttagggtgcattgctaatgatctagcaatcgctactctttgtttttgtccaccagataattgatgaggataagagtcaattttatcggccatacctactttttcaagatattgcatcgctactttacggttctcatcatcaggacgctttagcacaatcttaggcgccagcataacgttctctaacacagtgtgattattgtagagattaaagtgttggaataccatcccaacatttttacgaatcttattaatatcggtctttttatcagccaaatcatacccagttacaattaattgaccgctattaattggttccaagccattcatagttctaattaaagtactcttacctgaaccagatggaccaataattgaaaccacttggccttcatcaatctttaagttaatatctttcaatgcatggagctttccatagtacttatcaacatgcttaaattcaataattgctgtcatggcttctacctttctttcctttgtctacacaatataattattttactcttcttaaagctaaaactaaatattttagcaattcaaaatagtataatagcctgctaatcttataaatttgttcggttttagcaaaatatatttgtatttagctagattaaaataatcatattaacgctacttacgaatttattaactactaactttcaggataaagaaaaagcccatcatcccctctagtttgggacgaaaggcttttttccgcggtaccacccacattgtctaagtatagaccaactcatgaagcaccgacatgcttcaccggcgtggtaacgtaccggagacgtctcgacctactataagaattgttagttcggtgagctgctaaaagtgtttttcaatagttcagggtctgctggcttttcactaacaccaactcactgctaagaataaactacctactcgtctttttcatagccttttaatttatttatatgtatttaacattatttttcaagaaaatgcaagggaaaataatttaaatcgcaaatgtatccgtttttaattaaaataaatgctgttaatattcggaaaatagcttagaatattagtgatacctagaaaattaaaggagtttgatatgggaaagcttgaaaaacccgttattattggaattgctggtggttctggtagtgtgaaaacaacaatcgcacacgaaattgccgataacatcgatgatcaagatcgaattatgatcatgacgcaggattcttactacaaagacaatactggcgtatcaatggaagaaagaatgaagatcaactacgatcatcctgatgctttcgatatgccactacttgaggcacaattaaatcaattgatgcacagaaagccaattgaaatgccaacttatgacttcactgctcatcccgtagtgatgaaactattcacgtcgaaccagctgatatcattattctagaaggaattttggtactctttaacgaagatatccgcaatttaatggacatcaaggtttacgttgatactgatgatgatatccgttttattcgtcgacttgaacgtgatatgaaagaacgcggccgctcacttgattcagttattaatcaatacttgggcacggttaagccaatgtacaatcaatttattgaaccaaccaagcgttacgccgacatcatcgttcctgaaggcggcgaaaacgatgtggctatcgatatgttaactactaagttgcaatcagttttaagtgaataattatcgagatataacaaacaggcaagctaggaataatacctaacttgcctattttaatactctaaattatcttagtttttcttatcatcctgtgcattagctgcatccaaaatacggttatatttcttagcaaagaataccaaaagcaaaacactggcaataacataaataaccgctgcaatgtagtaagcattagcataaccatcttgcgtattaaacaagtaaaattcagtgaagagaccatcaataactccaacgatagcataggcaatttgaactacaccagtaaaggctggacgcaagtccttgtcaacaataaccatctgaacttcttgctgaatcggcatcgtggcattggctaaacctgttctcaagaaaagcagaattgcgacaatgacgaataagaaggctccgctacctaaccggcgaccattagctaacaaaagcataaccggtacacaagttaatgtacctgcagcaaccgacacgattgcaccgagtttcttttccaaaaatggagcaaagaagtaaccaattagcattgctgcttgaacaaaagtgttgatggtagaagtaacatcacgtggaatgtgcaaataactattcaaataaattggcacataaacggcaactaaacgagcaccaagttggataccggcaatataaacaatccacatcaatgtcttcttgctcaaaagcttcttatacatggccaccttttcaactctgctaggttctttatcatctgcagtagaacgatagtcacgtggtacatcgtgaataaatagggctaagataaaggctaacatcgttacagcagctgtaatataaagtaaaattctgtatgaatttgtatagtcagctaaagtttggccggttaacatttcagaattacctgatagaactgaagcttcgtgataaggaatccctctaattaagccaaagaaccaaacaacagccttcccacctaagaaagtacaaattgtctgcgtaatcaagttaacaatcataacggttgagaacatcttagttctaatcttccctggaacatatgaagtccacatcagtggatacatcaaatcataaaccccaattgctgtccaagaaatagtataagcgatcatgatgataatttgattggttgtgatacaggttaaggccataaaaattgccgtcattggtggcaagatcagcaaaatctttcgatagccccatttatgaaccgtcgcaatcatgactgacatcaaaattgctgtcgccgcattaaaaatgtttaaacctgaaatcaagtgtggcgctacaatcttgtagtaagacaaggctgcatcattcgtaatccctgttactgcacctaaaataccataaatccataagtagacaatgacattgtgtttataacgtggattccaatttttaatcgcctcatcctcagcttccttttccgcattgcttcgtcgagccatataagtccccttccccttttatgaaaacgtatacaaatatctaatttaatcttagcacctatatagtattaataaagtgtgtgtatacgaaaaggtattgattatatgacttaggcaagccttggctttaatgctttatcaaatagattagtaatcaattttactagtacaccatcaaatactaatgatgaaatcatgctgacaataaacatcaaaatttggacattaatttgatagtgactccaaccaaataagaagtagctgggaataaagccacccaaattagcaaaaaaggcaccggtcaagacacttttccaagagaatctttcataacgttcctttttagggaaaaagccaatttcattcattgccccctgaattaatccttcaaaaattgtcaaagctccccattgtccgccgatcgccatttctacagtcgcagccaataattcaccgattgttcctgcacccttagtcggtacaaaatacattgctagtggtgccgccatgtaccataagccagtaaaaacgttgtcaacaaccggtgcataaccggtgggtaaaaagcttaattttactaagttatacacattgttaaagccataagtgtaaatcacacccatgatgatcccgattaaggcaactaaaataactgattttacattccattttgacgatctagtaaacataaaaaatgctccttactaacatactgtcagtaggagcacacaaataaaagttaattctcttgttagcactttcccttgcgcaagtattatcttgttcaggttcgaagggtattatctcagcattacgcacccctagtgacatttcatttatttatcaattaagtcaagtatagcacattgttaatcaaatgccatttgatctgtgtaaagtttgtaataaaatcccttttctttaagcagtgcctcgtggctgccttcttcgatcacattaccatcttttaacacaacaatcttattagaattcaagatcgtctttaaccggtgagcaatcacaaagcttgttcgtccagcaatcacagtatccattgccttttgaatcttttcttctgttaccgtatctacgttagaagttgcttcatccaagattaggaatggtggattcgttaaaattgtccgagcaattgacattaattgcttttgcccagttgaaaagattgagctagcatcgctaacttgagtatcgtaaccatcaggcaaagtctcaataaaatcatggatattagcctgcttagccgctgaaatcacttcatccattgaagcattcggcttaccataacgaatattgtccgctacagtaccagtaaataagacagagtcctgcaggacgatcccaacattatttcgcaatgatgttagttgaatatcacgtacatctgtcccgtcaaaggttactttacctgaattaacatcatagaagcgatttaacaggttcataatcgtagttttacctgaaccggttggtccgaccagagccactgattggcccttatcaaccgaaatatttactccgtgcaaaatttctttatctttattgtagccaaaatgaacattttctagcttgacaccatgattcaaaccactaatgaccttaccatttggcacttcgttttcatctttttgttcttcaactgtagctaatcttcttgccccagttaaagctaattgaatcatggaataaattgaagtaatttgtgtcaaaggttggaaataaacttgtgaatattcaacgaaagttacaatcaagcccaatccaatagcctgagaaatttgaccggaaataatcatccaagaccccatagcgatgacaattgccaaattaagtaagttcaatccgttcatcaatgggaataggattcccgaataaaattgccccttaaacaaaacggttcttactttattgttgtagaccttgaagccatcaaccgattcttgacgcaaaccattggtaataatcaccttttcaccattgatctgttcggtaatataaccatttaaatcgccaatttcatcttgctgcttatcgatataaacgcgagcttttttcattaaaaggacactaataatcaaaatgaatggtgttgtcgcaatcgtagtccaagccaaagtactattaatcgtgaacatcacaataattgttcccacgaacataattccctgggaaataatttcaaaaatcgcattgttcattgcgttgaaaatattatccaaatcggaagtaaatagcgataaaagtttaccatcctgatgagtatcaaagtagcgcactaacatccgttgaaacttggcaaatagattctcacgcatgtcattagttgaatccgcattgaacttggacattaccatccaagcaataaaaatcgctatctggctcaataagtaaaacaagaacatcgaccataacgcgctatagaacgtgttcatggatgctgtacccttttttaaatcaaccaaataagtagttaaagcggtaactgaacggcctaaatatgtaggtgccataacctgtgcaccactcgaaatcaaagaaaggataaccacaatagtgattcccttccaataaggcttcaaatacttagcaaaatagcgcaatgcctttttcgtattactcatttattcatttcctcctttcttacctttttgtgtcttgaagatttcttggtaaaccagcgaagtcttaagcaattcttcatgcgtaccttgtgccactaatttaccgtcatctaacactaaaattgtatcggcattaatcactgaaacaatcttttccgcaataataaaagtagtagtatcaggcagctcatgctctaaagcttgctgtactttcttctcactttccgcatccagagcagaagttgaatcgtccaaaattaaaattggtgctttagcaatcaagccacgtgcaatagatagacgttgcttttgcccaccggaaaagttagcagaacgctcctctacttcatgatcgaaagaatcgttataacgctcaataaattctgatgcttgcgccatattggcagcacgctgcaattcatgtaatttagcctgagcattaccttgacgcaaattagatgctattgtacctgagaaaagaactgctcgctgcaacacaaaagaaacagttttgcgtaatgcagcttcagttacatccttaatattttgaccgccaatttttactttacccttagttggatcatataaacgagcaattaattgggccaaagttgatttaccagcacctgttgccccaacgataccaaccatttgacctggcttaatcttaaacgaaatatcctttaaagtaggatcatccccatcaggataagtaaaggaaacatgatcaaactctacgctaccgctaagaggtgcaaccgaaccactttccacaaacttgacatctggttcagtctccaatacctcacgaatacgtccaagagaaatattagctcttgaaaattgcattaaggtcattccggcaatcatgatcgtaaatagcagggttaaaacatagttcacgaatggactgactaccgcaatatcacttggatgtgccgtaatatttttaccaattaaataaacaattaaagcaattacggtataagcgatcatctgaaaagctggcataattgcagagaaccagtaaccaatcacaatgttgtagtcattcaattggtccgaagtttgatcaaactttttaatttcttgtggaccttgattaaatgacttaaccactctcacaccttgcaatgtttcttgtgcttgattagaaattcggtccatcatttcttggaatttggtaaacaaactattcatttgtcttaaaacgtaagcgccaaaaccaaaaataagtgcaaccatgaccactggtgcccaccagaagcgcggaataatcacgatacagaagataaatgaaccgacaattaaaatcggcaaccgcaacatctgcataaatagctgcatcatcatgttcattacctggttcatatcgttgatcaaccgtgtagttagagaacctgctgaaaatttcttaatattaccaaaagagaacgtttgaatcttagcataggtatcttcacgtagatcactaactactccttgtgcaattttcgctgcaaaataaacgttaaaaatacccgaaataattgcaattatacctaggactactagccagattccatcagacaagactgcttgcttctgattcgccatcaatgccttttgaatattttccaataatttaggctgatataatccagaaaacgctgaaactaagatagcaataattgcacaaacaacatcttttttataacgctttaagtatggaagaattattttaaagttttccatttttactcctttcttcacttaaaaaatgccaaaaagtagtgctccattcttctgaaagcttagctaacaatttcattttgtcagttcccatggcttgagccgttttttcctctaactcaaatagaggacgcaacctgtcataagcatatttccgccctgcttcggtaagctggcaaaatcgaactcgcttatcgctaggatcaacagtcatcgtgatatgatcatgatcacgcagaatcttaattcctttgttaatcgactgcttgggtaaatcactcagatttactaattctctttgtgtcaattttccccgaatcagtaattcatacatgattaccactaaatagtcaggcaagtcatgatcctgctcccattggctataagcacggctgccatggataattgatagatttaatttttctgtctcactaattttcattacttcaccaccatatttagtctacatgcataccaaatatattagtatgcacatggactattgtcaaatcattttgtcaaaaataagactataattaaagtaaagaaacaatttttgcatctaaatttcaaattggtataataaaaaaatcatcaagtaaaacaaggcagggattatatgcgtaaaaagtttttattaataatttcaatagtggtcctgtttgctttgccattaagtggctgtaagcaaaacaaaaagcaaaacgtttatcaagcagttaaaactagtaaaaccattaactggggcgtcaaagccgacacgccattattcggctcaataaatattaaaacaggcaaacttaatggctttgaaattgatttagctaatgcattaacccatgaaatgctaggcaaaaatgtcaaagccaatttcataacaacaacggccaacaccaagattcagcttctaaaaaacacgaatgtcgacgccgtcattgcagcaatgaccattacgcctgaacgtaaaaaacaagtcgaattcagtcacccttactttcctgctggacagtcaattatggttgctgacagtagcgccattaaaaatgctaaaaatttgaataacaagaaagtgcttgtagttaaaggaactactgccgccgatgctatccatcaagttgctcctaaagcggaaattttacaattcgatgattacggccaagcttttgccgcattaaaagctggacaaggagatgcctttgtaactgataacggaattttagctgggattttgcgtgatagttccggctataaattagttggcggcacctttaccaaccagccatatggtattgcagttaataaggggcaaaatgacatgctcaagcatatcaacactgcattagcaaaactagaaaagaatggcacatataatcacctagttaaaaaatggtttggcaacattcctggtatgaacattaaagaactagaaaagaagtaagaaaaaggctaagatcaaaattttgatcctagccttttcgcttatttagcaatgaaatcaagtaaagtaaacattacatctttatttttctcaggcacaccatgattaataatctctgtaggcgtttgatgtaaatccttattttctaaagcatatgctccatcattaatagcaatctcacgtacattatcaatttgcggttcaaagtggaactgcaacccaattacattatctcccagtaaaaagccttgattcttaactagatcactagagaataataacttagcttcggttggaatttcactcatttgttcatgccaatgaagagctgttaacttatccggaattcctgtaatagtctgatcttgcaaataaactggtgcccaacctacttccttagcgggtgcatcaagtaccttatagcccaaagttttagcaatctgctggctaccaaaacaaattcccaagatcggcttgtgttgatctaacatttgtctaatcaacacacgttcatttttgacccaatcaagatcatcattaggactgtttggactgcctaggactactaatagatctgtttcatcaacagttggcaaaataccaaaattccctggatggtaaacgaacatttcgttatctctagcatggcaccaggcttgaatagaaccaggtccctcattaggtgcatgctgtaatacattaacgcgcataaaatccctttctcactcaacaatatttttgtttttcattttatactcaattctagtggtaaacaagaagaattcagttaatcttttactatatctttagaaactatatgtcaccttatatgatataatgttatacatatttttacatctggaggacttttatggacaatcaccttaaacgcagtattggcttaggttctgcactttcaattatcgttggaaccattatcggttctggaattttctttaaacaagcttcagttttagatagcgcaggctcaacctttatggcacttttagcatggattttagctgggattatcacattaaccgccggcttaacgattgcggaaatcggtgcccagatgccttatactggtggactttacgtctatattgaaaaaatttacggccgcgttttaggttttatggctggttggatgcaggctattgtgtacggtcctgctatgatagctgcagttaccggttttttaagtattatggtgactaatctctttggcatcggcaccgaatggcgtattcccattggtttgatcactatcatcgctatcggtggtttaaactttttagaaaataaagtcggtgcagcctttgctataatcactacaattgctaagatgatccctatttttgcaattatcttctgcggcatctgctggggtgagcaaaacgctgtcgcccaaactgtgactgagctgaatcgatcaacaggtggtcttggcgtagccgttctcgctgccctttttgcctatgacggttggatctttattgctaacttaggtggcgaaattaagaatccacaaaaattattacccaaagcaatcatcattggaatcactacagtattagtaatttacgcgttaattactattggtatttttagtttcatccctgccgataaaattcatgcattaggtaaaaattcaaccacttatttggctgacgctattcttggtccaattggcggtaaagttctatctgtcggcattattatctcaatgctaggcactctcaatggagaaatgctcacctttcctcgtattatttacgctatggctaagcgcggggatttgcctttctcaagatttttatcatacgttacacctaagggaaaagcaccagtcattgccactatgctcttaattaccttaactggaattatgatgactttcttcgatcctgattacctatcaaatctctgcgtcttcacaatttatagtttctatgttttagcattctttggcttattcattttaagatacaaaaataaggaccaacgtcctttcagcgtaccgttttatcccctaattcctttagtagcaattgcgggcgggctcttcgttttagtcagccaattcttcaatgatcccgctggcgttttgctttttactggaattaccgctgtcggctggccaattttctttttagttaaaaagatgagcaaagcacagaacacgattatcgaagactaaaaatctcaaatttttcttgttcatttttaataattatgatattctaattaaaattaatttaggagattcaattatgatttatcaagacaccacattggcatactcatctagctcaagttccaactgaacttgagtgattttggtgtacgtaaatcagcagccggattcactcaatcgtttctagacgataaggtgaatccggctatttttgtataaaggagaaaaaatggacaacaagcttaaacgcagtattggtttcggctcagctttttcaattgtaatcggaactatcatcggctctggtatcttttttaagcaggcttctgttcttgacagtgcaggttcaactacaatggccttactagcttggatttttggtggtctaattaccttggctgcaggtctcaccattgccgagataggggcgcaaatgccctacactggtggtctttatgtctacattgaaaatctctatggccgcattttaggctttatggctggttggatgcagatcatcgtgtacggtcctgcaattattgccgccgttgctggttttatgagcatcatgatgactaacttttttggtttgaatcattcatggcgcattcctttggctttaatcacagttttagcaattggaatcatgaatttcttcgaaaataaggtaggtgcaatcttttcggtcataaccacgattgccaaaatgattccgattgctgtaatcaccatttgtggaatctgttggggtcaacaagatgcgattaaccagactgtagcagaggttagtcaacacactagtaacttcggtgttgctgttttagccactttattcggctacgatggctggattttaatcgctaatttaggcggcgaaatgaaaaatccccaaaaattattacctcgagcaatcattgcaggaattacagctgttttggctatttataccctaattacaattgggattttccgcttcatccccgctaatcaaatttaccaactaggcgaaaacactactacttatctagctaacgcggttttcggtgcaatcggaggtaaaattctttccattggcatcatcatttcaatgatgggaacattaaatggaaaaatgctgacctttcctagaatcgtttatgccatggctaaacgaggagatctacctttttctaaatacttagcctatgttactcctaaaggaaagtcacccgttgtggctactttatttattgtccttttagcccttttaatgatgattttctttgatccagaccacttatcagatctttgcgtctttacagtttattgcttctatcttttagccttctttggaatttttatcctaagcaaaaagaataaagcagagcgtcctttcagtactccactttatccttttgtgcctataattgctattttaggcggtttatttgttttaatcagtgaattaattaatgatccagctggtgttttgctttttgctggaattgtcattatcggcttaccgatcttctacgccgttaaacgcatgaataaacatcgcttgtattaaagcgacttttctacactgtagcttgcacgccacaattcttccattttagctaaacgatgccaatctcctttttgacacattgtatacaaggcatgagcaggatcataagcaattggattgccctctgcttcttttaaataagccccaacaatgctgattaacatcatccgaaagcgttcaatctcattacggctaaagtaagtttcaaaatacttagttactaagcaatcaaccgttgcatgcgaagctttgcgcaaagaagcaggattcttacgatagttatacaaagtataagttgaaattccagttgctttacttaaactagtaatcttaacattacggtcagttattagtttctctgctctttgtacatcggttaaaattttgggatgcttaaagtgagctggcattgggatacgtttacttaattctgcaattaccttttcaacagcttccttcatttgctgcgtagctacttcttcgtttaccttgtcattaagcaattttcctactacaaacgtatgatcagtcacttcataccttttagtaactgcattgtaaaaataaccttcaatacctgtaatcttaactgcatcagttccagcttttgcatagtcaaaaaagatgtgttgctgatcaccagttaatggtgaaaatggcaaattatctagcgtaaaaacttgtacatttaaagtataatctgaatgagcgggatcatctgcatcacaatgatacatcttcacttcccgatcatgaataaaatcttcaaaaataagattttttccatattttttcttcatttcttaatccccttttatatagtcctattatctattataatagagtagagggagttttataactcgcccctctcattgcaccggacgtacggttccgtatccggcgctacgtttgtgattatttacgagataaataatattctagcggatcgaccaagcctgggcgatccgctttgcttatgcccaatacttttgggctaagcagaaagttaatgacatgacccgtacttcttttataccaacctaagcgcgtattagctactttatgaatatcttcatcactaaaattgcactttagtgccttgttaatccgcattaagttaatgtatattcgttttggtagtttccattgtttaatgattaccacccgtactttatgacgcagccattgactgaacttaattagaaaatatttcatgtcgccaactctaaagtaattgacccagcctctaactacttgatttatcttagtaaagactagtgatagaggctgagcagctgcttttctgcgacagagaagttctctcatcttgtcataaagcttgattttgcggtcatctcctggctttgcttgccagtattcgccacttttccagaaggtaaagccaagaaagttgctcttggttggtcgtacaactttggttttggttgcgttgacctttaggaatagctttctttctagccatgatgaaattgaattcatcacacgtttggctgatttaccgcttttgacaaagatattgcagtcatcggcatagcggacaaagcgcaggcctctttgttccaattctttatccattttatctaaatagatattggatagaattggtgaaagagggccgccttgtggtacacctagtttattaggcttaacccaaccatcttccattactccagctttaagaaaggctcgaattaaatggagggtggttttgtcatttacttgctctctaattattgaaattaatttatcatgatttaccgtgtcaaagtatttctcaatatccaggtcaacaacccattgatagccttcgtttaaatattccaagacttgttcaatagcgtcatgagcactgcgtccaggtctaaagccatagctatgctcactaaaatgaggatcatagatcttcattaatacttgggcaatagcctgctggattactcggtcaacaaccgtgggtattcctaaaggacgtttcttaccattagctttaggaatgtagactctgcgaacagcttgcggacgatacttcatcttcatgatggcgtcctttatttctacttgatgctttttaaaatagctatcaagctcatcaactgttctcctgtctacaccaggcgctcccttattgattttgactctcctgattgcttccttgagattattttgacttaaaatctgttcaattagttccatctcgtgatatctccatttctacttgtaaatttattcagaattgtcccaattgctttcaccatcaaagagttacgttctctttgtgctaggctatcctcttatccggactgtctgaacattgcttatagcgagatatgctcttacaaacattaggcccttcgctccagtttcattacaaaaccttcagcactactacgacctcagctgacttctcgcgattaacctttttcgaccaggcttacgatcgctgatattaaagcttactcggtttcacctgtccacgagatctctcggggtaagacattcatctttaattttccactgccccctggtttaccgtcttggttttacggttgtcctttggactttaacttgtgctgcagtctcatccaccatttggcctgaccaggtttctgtacgtaggctcggaaaactcgctagccacttccttcacccatagcgtcaccgctaacggcttgtggttcgctacacttggcgacaactacccgtgatctagactttcactagactaaacaaatgccatgcccgacacacagcaaaaaactagcttttaaaagctagtttttgtttttattagaaaatattcggtttagggcaaataattaccagcagctaagtataaatcgtaccactcttgtctagtcaatcgaatcttggcacctttagcagaatccctaatgtgttgcggattcattgatccaactagcatttgaatatttgcaggatgacgtaaaatccaagctgcagcgatcgcatttttacctacctcatacttatcggccagtttttgcaactcttgattcaacttggggaagccatcattatcaatgaaagtcccttcaaacatgccatactggaatggtgaccaagcctgcacagtaactttgtgtagacgggcataatcaagaaattggctatcacgatcaactgatggtttatctaccatattcatatgcatcccaaagtcaatcattcctgtatgtttcaggctaaattgtaattgattgaacatcaagcgctggctcaagcaactttgtaacaatttaaattgagccgtatcaaaattagatacgccgaaaaagcgcaccttacctgctgcctgtagttgatcaaaagcctcagctacttcttctggatccatcaatgcatctggtcggtgaagtactaatgaatcaagataatctagttgcattctttccaaaatttcatcaacactatgcaaaatatgttctttagaaaaatcataacgttttcctggaacaattcctgttttagattgaataaacatctcttcacgcttgatctgcatttggctaaaagcttgaccaaaaatctcttctgattttccaccgccataaatatcagcagaatcaatgaagttgatcccagcatcataggcggcttgaattgccacttgagcctctggaactgatttttgattcattcgcataatgccaagtgccatcgctggaatgcttaaagtagtacatcccattttaattcgtttcataatgtaagtcctttcattctttatttacctcacatcatgaaccaaaaatagctaagtttcaaccacaagaaattcaataatcttttattaatatatcttagctactgccgattgaattgattctttatctaagaattcgtcataacttgtatcttggcgactaacaatacctttaggtccaacttcgataatgtggttagcaatagtttgaataaattcatgatcatgtgacgtgaataaaattgaacctggatatgaaacaagggcatcatttaatgcagtgattgactcaagatctaaatgattagtaggatcatccatgatcaatacattagccggttcaagcatcatacgtgacaattgacaacgaaccttttccccaccagaaagtactttgatcttcttctcaatttcttctccactaaagagcattcgacccaagaacccacgcaagaaagtattatcatcttgttccttagtcgcatattgccgtagccaatctaagattgtaagttcatcattattaaagttagcgttcaaatcgcgtgacatgtagttaaaggccgttgtttgaccccatgtaacggtaccagtatctggcttaagtttaccagcaacgatatcaagcagcgcagtcgttgctaaagcgttacgcgataaaaatgctaccttatcaccaggacgcacgatgaaagacacattatccagaatcttttcaccgtcaaccgaataagaaacgttctccaccttaactagatcattccctaagtcacggtgcatttcaaactttacaaatggatatttacgactcgatggtttaatatcgtccaaggtaattttatcaagttgtttctttcgagaagttgcctgacgtgatttagatgcattggcagaaaagcgggcaataaattcttgtaattgcttcatcttttcttcttttttagcattttggttagcagctaattcattagctagcttgcttgattcataccaaaagtcatagttacccacataaagctgaatcttaccacgatcaacgtcacacatttcagtacatacttgatttaaaaagtgtcggtcgtgggaaacaacaatcacaatgttagggtaatcagccaaaaagtcttctaaccattcaacggtatgaacatccaaaccgttagtcggttcgtccaatagcaaaatatcaggattaccaaacaaagcttgggccaataagaccttaactttttcgctttcaggtaaatccttcatcatcatttgatgttcttcttcaggaatccctaatgattgcagcagcttagccgcatccgcttccgcattccaaccatcaagttctgcgaacttgctctctaattcagctgccttaaccccatcttcatcaccaaagtcaggtttggcataaagagcatctttttctttcattacttgatacagttccttgtgcccttgaattactgtgtccatgacagtgaagtcttcgaaagcaaagtggtcctggttcaagctggacatgcgctcattgggatcaattgaaattgaacctgttgttggttccagtttcccctctaacaatttaagaaaagttgacttaccggcaccattggcaccaattacgccgtagcagttgcctggagtaaattttaagttaacgtcttcatagagtgtgcggccaccaaatcgtaaactaacgtcggatactgtaatcaatctctttacctcgcttaaaatataaaattatgtttaagtatatcaaaaaagatggtcccttataatagagaatccatctttttaagcaatttattaaaactttttgaagctatctagcttttcctgggtaatatcacgaataattgcagtagctaaatcaactgaagccttaaagtccttataactactgaaacaatatggtgaatgttcatagcgcaccggaataccgatgacaattgttggcgcaccattttcgtagtaaattgcagcaccatcctgaccgccaccggttctaaccgaacgagtatatggaatattatttttatcagctaaatcacatgcatattgttggaacttaggatttggtaaaaatgtcgtatccatatcgcgcaacattgggccacgttttagaccagtttgagaaagccagtcaggcgtaaaagtatcatcagctggacagctttcgagtaccagacaaagatctggcttaacttttctagccgttacataggcgccacgcaagccaacttcttcttgactagaaagtgcagccactacgtcaaagttagtttcttcacccttcaaattatcaagcacatcaaccatcgcaccagcaccaaaacgatcatcaaagtctttaccgaagaataaaccggacttttcatgatattcgcatttaacatcaacaaagatagggcaacctgtatcaatcttgtagtccttgattgtctcctcacggctagaagaaccaacatcaattgacatatctgccacatcaggtacactattgcgctcagctgctgtcatgaagtgaggcggcttagttgctacaacgccagggatatattctccatcacgattgcgcactttaacgcgcaaggctggaatattatattttacccaaccaccaagtggaacaaacttaattaaaccattagggcgaacagcttgcgtaatgaagcctacagcatctgagtgcgcatcaagttgaattaccggtcgatttcccttattttctttcttggcggccccggatttaaaattgaagtgcaacactaagtgttaaacaaaaaggccatgaagacctaaacttgaagtgacgaaaaatcaagaaaggaagatcttcatgaccaattcaaattctagcatttctaagcactatcatcaattaaccagcgtacaacgtggacaaattcaagcaatgctggattccggcataacttcccgtactgttatcgctcaagaagttggctgccataagtcgacaatcagtcgcgaaatcaaacgcggaagcgtcctgcaaagagacagcagctatttattgtatgagcactattacgctgatactgcacagatttattatgagaagcgtcgcaaaaactgctatcagcgcaatccattgaagcattatgctgtctttttgagaatgctctccagacgctttaaagctaaatttgatgccaccagcatcgatgagttcgttggtgaattcaaaaggactatgccaggctacccttgtcccagcacaccaaccgtctatcgctatattgatcagggcttgctggacataagcaatattgatctgcctatgaagctcaaaagacgcaggaacaagcgtcatcacagccatggcggtcacgctttgcacaagaagcatcttggcaattccattgaacagcgtcctaaagagattgaagacagaaaagctccgctgcactgggaaggagatctggttaaaggcgtcagacgcaagaatcagcctgctttaatgactttgactgaaagaaccacacgctttgaagtagttatcaagattcctgactatcgggcaagcacatgccaaaggctgcttcaaaaggagattgacagacatcctgcctggtttaaatcaatcacgtttgacaatggctctgagtttgcggatatgaccaagatcaagggctgccagatttactttgctcacccatattctccatgggaaaggggcaccaatgagaactgcaatggtcttttgcgtcaattcttccctaagagcaagagcatgaaagacaagtcaaaagcttatgttcaacaggcaactgatgccattaaccacaaatatcgccgaatcctccaatatcacacagcagaggaactcttcaagcaatatatctcttcataacctaactgttgcacttaatttgacaattcaggaattatttattttaagaatgttacaaggtatttttgcaggctttgtttctaattccaatgctctagttgcgactgaaactccgaaggaaaaatctggacaagcacttggcactatggcgtctagctttactgctggcaacttactcgggccatttattggtggagccttagcgtctattttctcctatcgcgttaccttctttattacaggtggtctattattaattgcatttcttttgtcattgttctttgtccatgaaacagacttcaagccagtaactgaaaagaaacttgataaagcaagcggagtaattaaagaattacgctcaccgcaattaatctttggcttgcttttaactactctaattattcaagctgcaaataattcgattaacccgatcgtttcactctatgttaaacaattgatggctaaccacggtaatgtcgtctttatttccggggtaatagctgctttgccaggaattgctacattccttgcggcatcgcgcttcggtgcactcggtgaccgaattggaactcataaaattattattgctggctttattggagccacaatcctcttctttttgactgcttttgtacaaaatactgttgaacttggtattttacgctttttagtcggctttactgatgcttgcttgttccctcaagtgcagactttgcttactaaaaatacgccagcaaaaatcacgggccgaattttctcttggaaccagtctgctatgtacatcggtaatattttcgggcctctgctgggttcaactatctcaggattaactaattacagcactgtctttatcgttactgctgggattgttgtcttcaatttgattttgtttagatttaatgtgattaaaaatttgcagtaaaaagtgtctgggaaaaaactaagtctcagatcatgaaaaaagaacgttgaatttttgtttcaacgctctttttgtatacttttagctccagccttgatattattaaatcatcacaaaataaaaaaggtggaaactaacatgtacaagaattatatcacaggtcaaactgctttaacacttaatctagattttgccattccggccaatcatttggctaatgtcatcagctggtttgtagattcaattccagaagatgttttagtaggcaagactgctaaaacgggccgcccagcctatcatccagccatgatgctcaaaatactgctttttgcttactccagaagagttttttctggcagaaagattgagttgatgctggaagaaaatctgccaatgatgatcttggctgaccagcaaaagatttcatatcatactatcaataattttagatcaagcagccatgccaatgaactgattaaaaagagctttatctacttcactaacctgttagaagatgaaggcttaatcaatgaaggtgctgcttttatcgatggtactaagattgaagctgatgctaaccgctatacatttgtctggcgcaaagcggttgaaaagtatcatgaaaagctgaaaggccaggcagttgaactttatgatgaattgattactaaagaagtagtcaaagaaatggaaaaagaaaaagttcaaactagtcaggggctaaaggaattagctcaagaaactgaagcagaaattaacaagctgactaaagagattgagcaggaaaacaaagccattcctggcggttcacctcgaaaagccaagcgacgtggactaaaaaagattctgcaccggctaagaaaagattatgtgccaagaatgcaaaaatatgaagaagccgaagagatctttgccggacgcaacagttattccaaaacagatcatgacgccacctttatgcatatgaaggaagaccacatgaaaaatggtcaattaaagcctggctacaatattcaagcagtcacgaccgatcaatatgtagttgattatgccatctttcctaatccgacagatttcaaaactttggagccggttttggatcaaatgaccgtgttggacaagtttgacaaaatcgtcgccgatgctggctatggcagtgaatacaattattcgatgctggaggaaaaatatccagacaagaagtactttattccctacactatgtatgaaaaagaacagaccaaaaagtataagaatgatccaactaagctaatcaactggtactacaatgaaaaagatgattattacattgatcatcatggcgtcagattcaatttcaaatattacagccagcgcaaggatcgttctactggtcaggtccgtgattttaaggtttatgaggcagacgagttccagctaacgccagaattggaacaattggctaaaacagctagcggccgccagcgccaagttcgctataatcctaactggcaatatttaaaagaaaaagcaaaagaagttctccaaagcgaagaaggcagacacatctatggcatgagaaaatatgatgtagagccagttttcggacatttgaagaacgtatttggcatgcgcagaacgcacctgcgaggtaaagagaaggtcgaaaccgatatcggaattgcctttatgatgatgaatttgaacaaatattgtcaaagaaggtggctgaagggccgatttttattgttaaaaattttaaagagaacaaaaaaacgatcaagattcttaaaaaaggaaatcttgatcgtttttattcatctggaagctagttttttcccagacacttttctattccgcagctttctttgcttcatgatgattataaataaagtttgcaacatacccacaaataattagcaacaacgatacaatcataatttctctaattccggtatgaaaaattgtccgcattgttggcattaacgccttaggcaaactcttcgcagattctgcgtcactcaacttattcatcatggtcatcgtaatattgtggtgtccagcaattccacgtgctagagctaaattcataatcaccccataaacggcagccataatagtttgcgctaaaattctaatcaaaaaactaagcgatgtagcaggtgccatatccttttcaccagcgtcaatctgcacttttatttgaagaataacgaagattgagcctacacctaaaccagataacgctgcaatcgacatcaaaatctgatatggcgtactaattggtacaataattaaaccgattactgttattgcaatcaatgtaaaatcgaaaattaacaaatgataattattaaaatgtctgagtaaatgcggcgtactttgtgaaccagcaatatcaaagattgagttaggaatcaacgtcatcccaccgattaaggccgttgtccctaagattgcctgcgaccacatcggcaaataagtgttaactgcaatatatgcaccccaggcaaaggcaaaaagaatgaagtcaccaactaaagctttattagtaaaaaccgataatggcacgataggactagcagcttttttctcaactaagatgaaccagacaagcattacgatcccgataatcacgaaaatagccactagaaaattactagctagtcctaacatctgaattccaatcaaaaagcaagtcaaaccgccaattagggtaaaagcacctagtcggtcaaagacagtattgatgtttggcttacgaatgccacgataaaaaagaaaactcaagataattgataccaatcctaatggaacattgatataaaagacccagtgccaggacaaagcatcaacaatccagccaccaactagtggaccagcaatacaagcggccgaaaaactagctgcaatataactcaagatgacagttctacgtttaatattcggataaatataaccaacaatcacataaggaagagaacccattccaccagcaccgacacccatcagtactcgagaaacaaggaaaaagtaaatatcgggagccactccttctaaaactgaacctaaaataaataaggctagtgacagttcgaaggcaaatttgttacccattctttcaccaattttactccaaattggcactgagaccgacattcccagtaaaaaacaggcaacaatccaccccatatactgaattccgtgtagatcggacacaattgctggaatcgccgtattaataattgtcgcatctagccctgacataatattagccagcaacaaagacaaagtaaccattgatatttgcttcttagtcatttaatcccacctttttaactctaaaaactactattactcatagtatgcaagatttaactagcaaaataaagcacaatatttttccactaaatcttgacaatctgtgtttttccgagttaaatataaagaaaataatagtgatgacctttaaagttagtcccgtgaggctaagaaggaaatctgcacaagctaatactttttgtcgttagctaatacagaaggaccatcttgagccatgcgctcttggtggtctttttcttttggtcatccagaaaggaaaagctatggcaaaagaaataatcgatgctttaagcatgaaacgcgccttgatgcgaatgacctacgaaattgtcgaacgcaataaaggtactaaagatcttgtattagtcggaattaaaactcgcggttggtacttggctgagcgaatcgccaaaaatttgaaaaacttggaagatgttgaagtccctgtaggggcaattgatatttcacaatatcgcgatgatttaccagaggctgagaaggaaaagatgatccacagccaacaacttgacttcgatatcaccgataaaaacgttatcttagttgacgacgttcttttcacaggtcggacaattagagctgcccttgatgcgttaatggatcaaggccggcctgcaaaaattaatttggctgttctagtagatcgtggtcaccgcgaattaccagttcgtcctgattttatcggtaaaaatattcctaccgcaatgaatgaaaaagtccaagtctcaatgaccgaagtcgatgagaaagacagtattgaaatcgttaaataggagttttaaatgaataaaaaagaaaagtacagaaaccctgaggctatcttagacgtttatgaaaagcctgaatttggccaaggcgtactgctatccttacagcatatgtttgctatgtttggttctaccgttttagtgccaattttaattggaattaacccaagcatcgctctactttcatcaggaatcggtaccttggtccacatgctcttgacccacttcaaaatcccagcatacctcggatcaagttttgccttcgttgctacaatgcaagccttaatgaaggctgatggctacccggcagttgcccagggtgcgatcgcttctggtttagtttacgtagttgttgcgatcatcattagcaaaattggttcaggctgggttaacaaagttttaccaccaatcgtagttggaccaatcatcatcgttattggtttgtcattagcaactactgccgctaatgacgctatgatgaataattctaagtatgatttgacttacttcggtgtagctatcttcactttggtcatgaccttagttttccaaatgtgcttcaaaggcttcaccagtttggtttcaattatgctaggaattatctgtggctatatcttatcctgctgcctcggaattgttgatttctctggcgtggaaaaagcagcttggttcacattgccagcacttgatgtgcctggaatcagttaccacttcaaatggtatcctgccgctattttagccatggcaccaattgctttcgttacaatgacggagcacatgggccacattatggtattgaattcattaactaagcgtgacttcttcaagaatcctggcttacacagaacgatgatgggtgacggtctttcaacgattatcgccggtttcattggtggtcctcctaccacttcatacggtgaaaacatcggtgtgttagctatgactaaagtttactcagtttgggtattagctggtgccgctgtttcggccattatcttcagttttgtcggtaagcttgccgcattgatcgaatcaattccaatgccagttatcggtgggatctccttcttactctttggtacgatcgcatctaacggtttgaagatcttagttgatgatcaaattgactttggtgaaaagcgtaatatgttaattgcttcagtcattttggttatcggtatcggtggtgcttacctacaactgggcaatttccaacttacctcagttgccctttccaccattatcggaatgcttttaaactggattttgcctaagaaagcagctagtgaaaaggctcaagaagaaaagattaagaaagaaaaacaagaaggtaaaatttaccaatagatagaataagccatttaaaacccgttagttatcgcaatgatagctaacgggtttattttttactctcactttgcgcacacaatgttgtaagttgtgcgaaagttggcaaaagttagtgtaagttaattgtaaaagcttaagaagctaacaaagccctatatatcaaggcttcgagctactttagtaaaaactttgctctcactttgcgcacgcaatgttgtaagttacgcgaaagttggcgaaagttagtgtaagttgcgagagcaatagtatataatttattgacacaaataaatttaagtcatgaggtgacattaaatggactttttaaacttcaaagcaattacacaaactggtaattttaaaacaccatctgaaaatgaaaacatcgaatacaaagaagctagttggaaattacctaaatcattttgggaaactgttagctcttttgctaatacttcaggtggaataatgagactgtaaaatagtttgtgtaaggatgaatgattccttaaatttatttctttaaacattagaaaaaggagttcctttctcgtatgattggtttgaacaaaaaaacacatacagaaagaagaactccttcatgaatgattttaccaaagattttgctcaagctctattcaatccagacaaaataaatgatttattgcgcaaagaactacaacaggctgttaataacttgctagaagctgaattgactgcctttctgggctatgatccctatgccagaaatggctggaatactggcaactctagaaatggtgcttatttccgcaaagttgatacgcaatttggcccaattgaagtgcaagtgcctcgggatcgcaacggtcaatttcatcagcacacgctgcctgactacaagcagcactcggatatcttggaaagcatgattatcaagctttactccaagggcgtgaccaccagggaaatagccgatctaattgaaaagatgtatggcagccattacagtccagctcaggtatcaaatatttccaagcagatgattccaaaggttgaggcttaccacaaacgcaagctaagcgacaagtttttctgcgtctatttggatgcgacataccttcctttgcgccgagaaacgtttgagcgtgaagcagtctatattgccattggcattaaacctaatggacataaggaagtcattgactactgcattgctcctagtgagaacattgaagtctggacagagatgcttcaaaacatgaagtccagaggcttgaagcaagttgaactctttctttctgatggtgttgttggcatgaaaacagccttggccaggacttatcctaaagctcattttcaacgctgtttggttcatgtcatgcgcaatatctgcgctaaagtacgcgtcgacgatcgtgaaaagatcatgaacgaattcaaacaggtgcatcaacagacaaacaaagaagaagccacagctgtcctgcatgacttctataccaaatggggcaaggtttacagccatgttatcagaagcttgaaagacatagaaccagatctgctggtcttttataactatcccaagcagatcagagcttcaatttattcgactaacatgattgaatcatttaacaatgtgatcaagcgcaaagctaagcctaaggcagagtttccaactgaacagtcgcttgatgcttttattggtattcaggcaatgagctacaatgaccgttatttcaatcgaattcataaaggctttggtcaggttcaggacaccttagaatcctactttgattaaataaataattaaaaaatcaatttacgagaaagaactatttacacaaaagatttgacagtttcggaataatagtattaggcatagcagaagataagaataaacatgaatttagtataactggtgtagacaatgttgaagacattgaaacacaaattttcaatgataataacaatatttcatgccttaatcgacctgtaatccaaaataatgatgttcagatttctttttttcaaaataaaactattattcaagtaataattcatccagaaccctttaatactcgtccaataactgcattcggtaaagcatatattagaactggtgacagagatcgagtagctactaaagagcaacttaaatattttacagttgaaagtcaaagcgagattgatactcacttactaccttcgacctatacaatagaagatctagatgcagaaagtatcaaagaatatcgcaaaataattgaagaaaaaggtattattaatactaattctcaacttagtgatcaagaattcttatattcaattggtgttttcagaaaagatcgattaagtaattcaaatgaatatcatcttacagatggtggtctccttttctttggaaaatatatttcgataacagatcgtttcccacgttttcaattagactatcaacaatataatagcgataattctaccaactggaatgatagagtttctgcaggtgacatgaattatcccactttaaatatcttttctttttataatttagttttagctaaaatagaaacaaatatacgcatggtgctagttaaatcgttttagttaataaaaaagtccaatcttgttagactcgacttgtaaatagtaataatagaaaagagtctgatctgattgaactgtcttaagcttaagcgttttagccaccatttacaagttagttttaaagatttagtgataatttgtcggcactggtatcgtttgtatgcaccggctgagtttactcatcggcgaaatattgatcaaattaaaactacggacagtctgattttggctttacttatctggcaagctaagacaggaattgaatcacaaagaagattctgtgaatgtttcaattgtttatcacactcacgttttaatcggcgttcacgtcagctattgcaattgatttatcagatacggcaagaaatgaataaaaaggttgacctgaatggacatttcttgatcattgacagctttccggtacctgtttgccaaccaattcgcaactatcgtgctaaaatttttcgcggttatgccaacattggttataaggccaccaagaaaatttacttctatggtttcaaagttcatgccattgttagcgatgacggttacattcttgattatgtcgtaacaaaagcatcagttcatgatgccaaggagacagttgaactgctggaaaatgcccatccatctaattactatcttcttggcgacgaaggctatttaggcaaagaactgcatcaacagctaaaacaaatgggttatgaactttggacaccatatcgtaaaaatatgacaggagctaaaaagcacaatgatcatcaattgatggctattcgcagaacaattgaaagcgacttttcgcttctgacctattacaatgccgagaacaatcgagcacgtagtctgataggctttcaaagccggttggaaattgcaattttagcttataatttggcttattgtctagaaagatttaactagcaccacgcgtacaaatatacctgatccatttattcaaggtaatgaccttagtagaacgtcctatcacaacgatctaatcatcgcagctaaggaagccctagtcaattgtttaatgcattcatattatgatggtatggtaggtgtaaaaattgtagatagacctagttactttgaatttacaaaccctggtactatgcgcgtaagtaaagaatcgtttttacgtggacaatattcctccattagaaatactgaaatcgctagtttattcagacgaattggtgtctctgaaactgcagctagcggtggtccaagaattcttaatactgtgttgcaaaataatttaaatgatcctgaaattaacattgattatgaaatcaatactactcgcattcgtatttttaagacttttgcaattgataatcaggaaaaattaactgaaccagagaaatttattatgtcttttgctagcagaaatcctaatttttcaataaatgatattgttaaagatccgcagaatcattttggtaaacaaaccacgattagaaaatatgtaaattcattagtagagaagcatttactatccaatgagaaaattggcaaaaaatatatctacaatttacagaaaaacaatgattatctaaatcgcgttaagcaccttaaacatcttgaagataatttactcaaatagatcattcaaaaagctcaacctacaaaattcatgcagattgagctttttcatcttatttatcttcaaatattctaggcttatcgtcatcaagtgaaacatgcggaatttcggtgttatttgtctcaacttgatccttctcagacaattctgccttcattaactcacttttggctttactagaagtattgcctaaaagtaaagttttctcctgcggcgtattcaccattgcctgtttttctttgaattttttataaacaatcgccgctactgcaccaatagctccagcaacaccgataattgtgccgattaatctcatctttttcatagggatcacctcgtattttgaaatcactttcttattcttaattatatctaattatgaggttgaacacatttttaatgcctattacctaaaactttccgcaatttccggatccatctcatcttctaaaacactgtagccttgatccaaagtcttgatcaatgccatatcctcatcatctagttcaaagtcaaacacatcaaagttttctgctaatctagccttatgaactgacttaggaattactacataatttctttgcaaaaaccatctcagcatcacttgagcagtagtcttatgatgcttttctgcaatcttttgcaagacaggattagtgaaaatgtggttggctccttctgcaaatggtgcccaggcttcaggttgcacgccctctttttccatatattgctgtgatttccattcttgattccagacattagtctcaatctggttcacagccggctttacatcattaaaagtaatcaaatcagctaagcgttcattccaaaaactacttacaccaattgcccgaatgcgtccctctttatataaacgttctaatgctcgccaagtgccatagtaatcgttatatggcttatgaatcagatacaagtcgatataatctaactgcaactttttcattgaatcatcaaaagcttgcaaggtatgatcatagccatacttatcgacccagatcttggaagtgacgaaaatatcctcccgtggaatgctgctatgcacaagtgcatccccaactgcctgttcattgccataaatttgcgcagtatccacaagtcgataacctacttccaagccgttttctacaacttgttgagtttgagctaaatcatcaatttgataaacgccaaagcccaagcgtggcattttgacaccattatttaaaattacatagtctttcatatttcttctcgttttctagttaattattgctatttaattttattttaacatagcccatgaaattcgactttatttcgtgaaacatagatattatttcttaaaattaagcactcaagaaaagcctaaccagcatccctcaacggaattgccagttaggcttcttttatttttcaacttttgcttgataaaatccaaagctcatctgcttcaacattctagtaaaactatcaatgtctagctttttaccggtagtcaaagcttcaaattcaccatcaggatcaaccaatttgcggtcagtcctgtgaaatccatttctttcatagaatttcaggcgactaacacgctgcttataatttttcgccttcttggtaactggctcaatatcaatgacaatttgcttatcagggaatcgatcctctaacatcatcaagatcttggaaccataaccttgtcctcgcaatttttcattaatggctaaataggtcaaatagactgtattatcattctcagcataataagtaatgccgcaaaactgaccatcattataaattgcgtgaaacttaacatttcggtgtaatgacattgctaaaagagaaaacatggagaatctttcccaagctggaaaagccttcatatataacttcttagcgtcacgatatgcttttgtgccccatcgggcgggtttagagtctaaaatagtatccttcttttctaattaaaaattgattgttaataactctgaataatattattatacaaaactttttagctttttggaaactgtcaaatcttttgtgtaaatagttctttctcgcaaattgattttttaattatttattcaaaataagattctaaggtatcctgaacctgaccaaagcctttatgaattcggttgaaatagcggtcattgtagctcattgcctggatgccaataaatgcatcaagcgactgttcagttggaaattctgccttaggcttagctttacgcttgatgacgttgttaaaggattcaatcatattggttgaataaattgaagctctgatttgtttgggataattgtagaagaccagcagatcgggctcaatttccttcaaacctttgatgacattgctataagctttattccatctggcatagaatttgtgcaagacagctgcagcttctttttggcttgtctgttgatgtatctgcttgaattcgttcatgatcttttcgcggtcatccacccggactttagcacagatattgcgcatgacatgaaccaggcagcgttgaaaatgagctttaggataagtcctggccaaggctgttttcatgccaacaacaccatcagaaagaaagagttcaacttgcttcaagcctctggacttcatgttttgaagcatctctgtccagacttcaatgttctcactaggagcaatgcagtagtcaatgacttccttatgtccattaggtttaatgccaatggcaatatatactgcttcacgctcaaacgtttctcggcgcaaaggaaggtatgtcgcatccaaatagacacagaaaaacttgtcgcttagcttgcgcttgtgataagcctcaaccttggggagcatctgcttggaaatatttgatacttgagctggactataatgactgccatacattttctcaatcaagtcagcgatttctctggtagttacgcctttggagtagagcttgataatcgtgctttccaaaacatcagagtgctgcttgtagtcaggcagcgtgtgctgatgaaactgaccgttgcggtctcgaggcacttgcacttcaattggtccaaactgggtatcaaccttgcggaaataagcaccatttctagaattgccagtattccagccatttctggcatagggatcatagcctagaaaggcagtcaactcagcttctagcaagttattaacagcctgttgtagctctttgcgcaataaatcatttattttgtctggattgaatagagcttgagcaaaatctttggtaaaatcattcatgaaggagttcttctttctgtatgtgtttttttgttcaaaccaatcatacaagaaaggaactcctttttctaatgtttaaagaaataaatttaaggaatcattcatccttacacaaactattttacagtctcgctttttgacataatacttatcttccattcaaaatttaagtatgcattaatattatttattttagtaaccagtcaatgacattaacttggctaattccattatcatcataacttcccggatcttcggtaagtaatatcttagggtagttatccttaatctctaaaaaaggtgctatttctctttgataagttttttcattctgaaccgttaaactaacttgatagtattcccgaataccatcgcgaatagcaacaaagtctacttccttttttcctaaatttcccacatacacttcatagccacgtctgattaattcaagatagattatgccctctaatctgttccccatattaggacgcttttgccccaacaacgctcttcttaatgaaggatctaccatataatacttattgttaatttgtaaatactttttaccagcaatatcataacgatcacagcgataaaataaatatgaatctaccaatttttctatatacgccatcactgttgcgcttgtcgctttaacgccattattcgatagcacattcgctaccttagttggagtaattaaattgccattagtatcggtcaaaaaagctgcaatatgttccaacaaggtagtatttcctcgttgcattctagctaagatatccttaaccaagacagtgttaataattccttgaatataagacagataggtattttcatcctctaattcagtagcaaaagggaatcctcctcgctctaaataacgattaaaagcttcttgatgggataactcaggaactgaggctaaaaattctttaaaagaaaagggatatacagggatttcaatatacctaccagccaataaggttgctaattcacctgaaagcataaaagcattcgatccagtgacataaagatcaacattttgcttgataaaaaggctatcaatagctttttcgaaatgagggatgtcttgaatttcatctaagaaaatataattcattttatctggaatcaatcgttgatcaatatattgatacaattttaaataatcagtaattgtagcaagccctaaatcttcaaaatttaaaacttgaatttgttcctgcttaacacctgctttaagtaattgttcctgatatagttttaaaatcgtggacttaccagaccgacgtactcctgttaaaactttaattatttgtttatcacgtagtttattcaatttatcaatgtatttaggccgcggaagcatttttaatcctttcaagttaatgtaattcaaattagtttaattttcacgtcaattttagcatataattcaaattagtttcaatctcttaaaacttctgagatgagttttaatttaatttgaatttactcaaaggcttaccactaaatttaaataaaaagaaagtctgtcaatctaacaaactttcttttttcataaataatcgttaactacatcaacttatatttcttcatcaattcttcgatataagtgcccttaaccttcttaagcatccctttaatcgcaaacttttcaggcattggcaaatcaagatcagccaacttcttctggtcattcaggtaatacatcgcattcatcaacattctgacatcaaatgcggaagcgaagacttctggtacaccgcggtcaatattaagcaaagtgtagacagcttccattgccgtccgaactgaatactctgtcgtaaagacagtgtctcttggagtttcggcaaagttaccaataaaggctaagttcttagaatgatctggaacaacctttgggcggtcgcctaaagctcttggcataaagtaagaagtaatatatggcatgtgaaccggaattgttgtagctgcggcagctatttcaggaattctttcttccggcacacccatgtgatagagccactcttcacacatttcaagcccattacaatcaggcatcgtcttttccacataattacccttggtatcagagaataaaccatataaccaaacaattaattcatttggtttttgcgccttaaagtgtggctgacggctgattgagtaacctaatagccaattagaatccttaatagtagttggtccactagttacgattgagccactgtgtggatcctttttattaacagcttcaataaatggcacaacatcatcattcttaaaggtaatagttgaagacatccgccagttagcctttggaatatccttgcaaaagacatcaggatggccaaagtcttcatcttgagctgctaagttcttccacaatcgccagcttgcacccaattcatgttctgctggagcgtgatgcagttgatctccataggtagtactctcagtaattgaaccattagtaacgaagactaagtcatttggtgttaagtcaatggtcttcttttcgccatcttcggttaaaataatttgtttagcaaccttttcgccgtcagagcggttaacaaagatattatcaaccaccgtattatagtggaagattacaccacgatcctttaaatacttgaccagcggcaaaatcaatgattcatattggttatacttggtaaaacgcaatgatgaaagattcttcaaggttgctacatgctgtacaaagcgcatcaagtagcggcgcatctccatcgcacttgcccatggttcaaaagcaaacattgttgaccaatataaccagaagttagattcaaagaattccttagtgaagacttcattaatcttcttattttgcaagtctttttcgggagttaaacaaagatcaacaatttccttcactgcctttggtgtcaaaagaagttgcccatcagtcggcaaagcttgaccacgatttacaattactctagttttagcataacttggatcttttctatttaaacgatagaaggaatccaaaatagattcaccttcatggtcaggcgaagggattgatctaaataaatcccacaaacattcaaagtgcggctccatttcacgaccgccacgaatgatgtaactttccttttctttattatagatcccatccattgagccaccaggcagacctaattcttcaaaaatgtgaattttcttgcccttcatttggccatcacgaattaaaaagacagcagtagctaatgcagccaagccactaccaacaatataagcagatttttgatcaacatctttaggtttatcagccttaacaaaggcttcataattgccattactataatgcataattgacacttctttcaataatcgttacacttgtaactatttatgcttataaaataatgtaagcggtatcagttgtcaaacattttacatttggggatgatcttgatgaatatgaagagtctgcatacgcagcaacaaattgaacatgcattattcaaattactacaaaaaaagccttatacggagatctctattgcagaaatcacccgtaaggctaaggtatctcgtacttccttttatcgcaattatgaccaaaaagatgaagtcattgcgcaatttttatttaatcaataccataattttatcgctgatattgatcaacataatttgagaacttttaagcagcagcttactgcctaccttgaattcttcaaagataatcctcaactaatgaaattactgcttgatgcaggatttgaaggagaattacttaattttcaaactaaatatttgaaaaagctgatgtcagtttaccattctgatgtccacctacccgactatgcaatagcctatcaatctggtggaatctatatgctgttagtctggtgggttaagcaaaattatcagaccagcttgactgatttaatcacttatgccgaaaaacacattatgctgtaactaaaaaagaagagctcacaaatcgagcttttattttcaaaattattacaatttcttgcattttttaccaaagttaaagtagaaattcattacaaaggcgataattaacaaaatcaatgaaaccaacataatttccttaataccgccgtggaaaatagttctcattgttggcactaagttttgcggcaaactcttggcactttgcgcatcactcaatttattcatcatggtcatcgtgattcccttgtgcgtttgaactccgctggcccagttcagattcataattacgccataaacagcagccattactgtttgagctaaaattctgatcaaatatgaagttgaagtggccgttgccatattctttagtcccgcatcaagttgtacctttaattgcaaagcaacaaagataaagccaaccccaatgccagaaaatgcaccaataaaggtcaacatctgcacaggcgtatgtatgccagaaataaacaaaccagctgatgagataatcatggcaactattccaatcaaaactaatttaaaggttgtcatatgctcctgaatcgctgctacactttgagatgcgataatttcaacaatcgaatttggaattaacgtcatcccaccaattaaagctgacaagcctagtaatgcctgagcccacattggcatataggtgtttactgctaaaaaggcaccccaagtaaaggcaaataataaaaagtcgccatctaaatctttatttttaaataaagaaattggaataattggattgtctgcatgaccttcgcgaataaagaaaaagacgatgaagactaaactaattataatcaatccaattatgatccagctagcggttaaaccaactagttgcacgcccatcaagaataaaagcagtccgattactaataaagtagcaccagggatatcgaaaaccggtgtcttttttggagtaaccggtttgtagtaaattaaacaaatcaaaaatgcaattaagccaattggaatattgatatagaagacccagtgccaagagaaagcatcaattaaccaaccaccaacaagtggccctaagatcgcagccccattccagctggcagttaaatagcctaatactttggttctcgttttaatatttttaaacacataaccagcaatgatataaggtaaagaacccataccacctgcaccgattcccatgataaagcgagagcacagaaagaaaataatatttggcgctatcccttgtagagccgatcccaaaacaaagagtagcaatgaaagctcaaaggctcgtttgttagtgattttctctccgatcttggtccaaatcggaatcgaaatcgacattcctaataagaaaattgccacaatccaacccatgaattgaattccgtgcaaggccgcgacgatggctggaatagcggtattaataatagttccgtctagccccgacatcacgttgccaagcatcaaggctgccgtcaccattgtaatctgttttttattcatgcttaacttctttctatggtatgtaaaaagcgttagacaaaaatttctaacgcttttgagtaaaaaaatatggaggatacagggctcgaacctgtgacctcctgcttgtaaggcagatgctctcccagctgagctaatcctccattatggggcggaatgtgggaatcgaacccacgcatgctggatccacaaaccagtgtgttaaccccttcaccaattccgccatcaacggtccatatgggatttgaacccatgatctcctccgtgacagggaggcgagataaaccactgctccaatggaccaaactagaggaggatgtgggatttgaacccacgcgcggcagaaccgcctaacggttttcaaaaccgtccccttaagccacttgggtaatcctccatagccgaacagatactagtataccaaagtgagaagataacgcaagaccttttttaaaaaaaagcaaaaaaataaagcctttcggcttcattaactatgtaaatttttctggaacagcaaatacttatattctttgccagcaatttcaataaaacgttgggtagcaatattacgccagccaaagtgcttaaagaattcttgtgcatctttatcttcagccagacaccacaagtaaatcttgccatagcccatcttcttcagttcattttctgcggcatttagcaaggtcttacctacattgtagccttgaaaatcaggtttaacatataatgccatcaactcaccgcagccaagcattctagtgtcacgtggacgaccatagctaacggctgcttgaacctcgttattatcgtctttaaaaactaaattatgacgaccactctcattgagtcgttttacccaagcagtagccggaatattatccaaaaatacatctggtagcacgcctttatacgtctcttgccaagttgtttggaaaagcttacttgtttgttttgcttcgtcttcactaattaatggtttaataatcatatttacttcttctttgtcaaaacagtcacagcctctacatgtggcgtttgtgggaacatatcaacaggatcgattcgcttaaattcataaccttgttcttggaacaaaagcaagtcgcgaatcattgttgcaggattgcacgaaatataaacgaccttcttaggtccagtcttaactgtcgcattaataaattcaggtgtcaacccttttctcggtggatcaacaaaaaccacatcggtcttcataccctttttagcccaacgcggcattatttcttcagccttgcctaagtaatactttgcgttttcaataccatttagctcggcattgtccttggcatccttgatcgcatcccggacaacttcgattccacgcacggccttcacatgcttagctacactcaaaccaatcgttccaattcccgaatatgcatcaattactacatcatccgaacctaaatctgcttgcttaatcgctaaatcatacaagcgcggtgtttgcagcgaattaatctggaagaaactttgaggtgaaattctaaactttaaatcaccaatttgatcagtaatctggtcattaccgaaaactaggtaatcctttttacccaaaatcacattggtcttcttaggattatagttcaagactaaacctgaaaccttaggaatctggctaatctcagctgcaacacccatcatttgtgggaaatccttaacccggctgaccaaaataaccattatctcgccattagccttactacgacgcacatcaagatagcgtataattcccgtattgtttacctcgtcataaggcgcaatcttgtacttgcgcaacacatcacgcactgcaaccaatacacgatcaatttccggatcagtggtaaagaaatttgtcaaaggcactaaatcatgtgaatgtcgtctaaaaaagccaatctcaagttgtccattatattctcgcacaggaacttgggccttgttgcgataccctgtttgctcaggactaggcaaagtttgtcctacttcaatctcatctaaatgtgccttcttaagtaagttaacaacttgattacgcttgaattcaagttgcttatcatacttgatatgagctaaagaagcgagtcccgtttgaacccattgattcaacttgatcttaactcgatcaggactttctttttttatttcttcaattttagccaaagcaaagttcttcttaacctttaaaatctttgcactaaccacttcacctggaagtgcattagtaacaaatacggtcattccctcgtaatgggccacacccattgcttcatacgaaagatcggtaatttctaaatctataatttgattctttttcatactcactcaaccttaaaaaaatagctctctattattataatacttgaccaatctttgtgcttcaaaaaataatcgactgctttttagaaccaactatcacccatatacgcatgcaaaatgtggttagccgctactttcaacctcaaataattaatattattagaaaatagcataatcatacgcttggtcttgtaattcgcaacaaagcagcaattataaccagggatactgccattagcgcgaatgatgtcaccattaaaatacactccaccaaaataagctaccgtctgatgctgggcttggtggtaatactcgtttaccattttaggatttttcagcacatcgttatatacaaacttccaataatcaattggtgacatgaataagttccctgctccaaagtccgacgacgtcgtcactgtcacttggtgccagtcaacatttttactcattggctgagggatctcgttttggttaacctcagaaaaatccttaactttctggagcttaagtggcttagcaaaatcggtctgaatataagcattataacttaaattagtttgtttgctaataatagctgctagcaattcataatcaacatcttggtaatcccaagtatgaagatgatcattctccatgtgattaagcatataagctatttgctctttctgatttttaagcggagaagatggtcgagcattgttaaccaagccactagtatgattcatcagctcacgaattgtaatatctttactacctgaaacttgaggataatagttagataaagaggtattccaacctaataacttttcttgttgcagctgataaattgcagttcctgtcataattttttgtagcgaagcaatcggaaacaattgattagcgttaactatttggcttgaatcagtggtctccttattttggacaacaatcggttgcccctttttatcattaattaacattacaccgttgatatgatgaaacttcatataatcatgcagctgttctttctgattcttaatgccattatccagcttatcccctggctgcacaatgaataaaaatattgcaaaggcacaaagtgccaaaaagatggataaagctcgttttttatgcataaagattcctcttaattactatcccaagcaatgtaataactatatttcctcaattgtaaatctagtatctaaatagattcaactattgtgtgattttatgcaatgaaaaaacatgcttcattagaaacatgttttttcaagtcattttaataaaaacatgaacagcataattaccgcaataaatttcactgctcttatttcatgcactatactaaaaatagcttttctataaatacgtcacattcaaaaagattttgcttaaatctattgacagatatttttaatcttgctatcatattgctcaacaagaaacgaaaagtagcaactttgctcagcgttcagagaactggtggtagctgcaaaccaggcaggcaaagcttgacgaaatacatcgttataatgttgttcggaaaaattcagaaccgttaccatctgatagagattcaagttcttatgcttgaaagagtgggtggtaccacggctattgtcgtcccgttgactaataagtcaacgggattttttatttggaggaatataaaaatgaagaaaaagaaagtttcctttactgaatcaattattatcttaattgcactcctcactattctgggattggcagttatcaagcttgccctttctccagaagtgccagttttattcattgtccttttacttaccttttgggctagactgcgtggcttttcctggcaagatgttcaagatggcatcaaagaaggaattagtgtagccattattccgatttttatctttattttaatcggcgctttgatcgggatctggattaaagcgggaattatcccttccatcatggtcctgggtttccacttaatcagtggtagtttcttcgttccatctgtttttattgtttgttcaattattgggatggcaatcggtagtggttttaccacaatctcaactgttgggattgcgctttttgggatcggaactagtatgaaccttaatcctgccttagttgctggggcaattatctctggagctgtttttggcgataagatgtctcctttatccgattcaaccaacctttcttcagcagttgccgaaagtgaattattcgcccacattaaaaatatgatgtggtcaaccattcctgcttttgtagtttcattaattttattctggatcttaggcaacagtggcaacatggatccaactaagattgaacgtacttcacatattttacaaactaacttcagtatcagctggtgggcaattgtcccaattatcttgatgatcttttgtgcttggcgcaaaatttccgcaatccctacgctctttttaaacattgcgattactgtaatcatgatttttattcaaagtccccacgaatctattcaatcgcttaacaatttagttatgaacggctttgtggctaaaactagtgatgcttctgttaatgccttattaacccgtggtggtatttccaacatgatggctacagtagctttgatcatttctaccttatctttgggtgggatgctcatgaagttcaacattgttcaaagtgcaatggaaccactcgttaaacatttaaccaagcctggtcgtttaattacggtcaccattttatctggtatctgtatcaacctttttgttggtgaacaatacctatcagttatcttacctggtcgtgcatttaagccggcttttgataaaattaagctttcaccattagcccttagccgcgtacttgaagacggcggtagcgtaattaactacttaattccctggggtgttgccggttcattcgccgcttcaactttaggtgtgccagttttacatttcttaccattcgtcttcttcagtcttctttcaccaatcttctctattttgagcggaatcaccggaatcggcttgaagtgggctaaagaaaagtagaaaataatcatatcagtaaaaaagttcctaagaccatcgtctttaggaacttttttacgcaatctactagctaacggttgtgtcatgttgcaaccaattattactcttttcttgacattaccattcgatcattcacagcagctctttttggtatcactttataacctcgtcaaattcacttcaccagccttcatttttgggattgtctttaccgtaattaggaaaaatgaccagcaggcaaaattacctttaaaatcatatttttccgaccagtgggataataacttctttcctacttttgcttggactttattttatctcattgctatgcctaatctgcagcaacacgggcattttcacaatattgccacattcatctggcaattcttcagtgataatgccacacctcatctttggtacagcgtcatgatgctgcaatttttgcttatcatgcctggaatcaaatcagtctgcaactgggtccagcattcttatcgacgactactaatcgcagttattagttccggaattatttactttgcctggttaattttttatgatcacttcattttaaatggtcccgaggctacccattggtatttattagatcgtatctttatcagctttttgatctttgggctctacggtggcttaagctggaattttcatcatgaaattcaaacttttctgtttacatattggtggctaattgtgggattttaccttttaacctattttgggaccagagatttatttttagccactttcaaattaacagacctaaccaacgacagttattacctaccttcaatggcaatttatgctttagcggttatcctcttgatttacctaatctgtattgcacaaaaagtctttaatatgaactactggctaaaatcaattcactttctagctttttatgcttatcgagcatttttagccaatgttttttgggatcgtatcttttggcaatattttaattttaaacagctagctttacaaaatatttatttagctgtcttactactttggatttgtacatggtgtgcttcatatttatctgtttatgtagttcaccacctttggcttaaaattaatggttctgtcggtccatcctaatttgcgcacgtcgatattcctgactgtcacgcgtaggttgagcaactatatctgtaattattatttcatgatcatttcgttcaaagacgattgcttggtctaattccgcatttacttttttattgatagtggtatcttgattaaattttaaatcatccagctcccgatcaataaatgttttttgcgaactcgtcagctgatgatatttttctgccgcttctggagtaaaggacaagatcgtctcccgtctgaattcacctattttatctggatattcacttctttgaccacggatgtcattgtcaatatatcttttttccatcaaaatcacttcctttatatcttcactatacaggaggcgattttctttagacatctttctgcctactttagttttttcataagaaaaactttactattattcatttgaccactaaatacggtaaaatagataagacaagtaaataaaaggagtgtatatttcatggataacttttcaaatactccaggacggcgtcaagtccaggatatttctgcagttaacagcttcttgactaagatgtacagtctcatgattttggctgttttagtttctgcagcaactgcattcttgactacgactgtgtttgcatctgcaattgctaacatgtcacaagccgtttactggatcatcgtatttgttccaattgttttatgtatgacaatcagctttaaggcagcaaagaacccaacattaggcatcgttcttctgttgattctttccgcagtctacggcttcgaatttgcctttatcgcaggagcatttacttccgcttcaatcgctggtgcctttttatcagcagctggcgtgttcgcagcaatggccgtcttcggttctgtaactaagcgcgacttgagcaactggggttcataccttggcgcagctttgatcgggttcttagttgcatggctcgttaacgccttcttcattagaagtggcgctgcaacctttatcttctcctgcatcggtgtgttaatcttcactggcttaactgcctacgacgcacacaatgctaagaagattttcatgacctacggcggtcaagtttcagatactggtttagccgttatgggggctttaagcatgtatctcgacttcatcaacatcttcatgttcttgctacaaatctttggcatgggcggagatcgcgattaattaatttccatacaaacatagcgttgattagcttttacactagtcaacgctatttgttttgcttaaattttatccaccaacataaaattcgatatgttgttgtaaattgttgaattcaactggacaataaccaccaatttcgccatcaaggttaactggcaaatcttgtccttcacttttaccaatcaattccgccttcaagctgcgggtcttggtataaatgatatttggatcatcaacgtgcttaccattcaaagccaatgccatcaacttcatcatgctaacagggtcagaaggcttgaccacgatcaattggaataatccatcactaagctgtgcatcaggcataacttgctcaaaaccaccaattgaattagtcattcctagtaggaacattgataattttccttcataaacgccatcatcataagtcaaacgcatctcattctcagtcaagtgtggcaacatttctgcccccttgattaagtatgcggcataacccaaagctgacttaacctcagatggtacgccatatgttaactcagttaaagaaccgctggcagcaatattaacaaaatattgaacctggtcaccaaaaacagctttaccgatatccattttacgagttttattctttaagattactttagcagcatctggaatattatcacgtggaatggctaatgcacgagcataatcattagtagtaccagcaggaataattgccattttaggcctgttttctaaaaaggcaatcccgttaactacttcattgattgtaccgtccccgccagctgctccgattaaatcaaaaccttccttagcagcacgagtagcttcattgcgagcactattttctttaggtgtagttctaaaagcactagcttcgtagcctgcttgttctaatacatctaaaatatcggccacattctttggcatctgttcgtgacctgatacaggattataaattaatcttgcttttctagtcataattactacctaacgttctaaaaattaacgactttgcaattcttggttaagtaacttgttaaccatcttagggttagccttaccacgagtttgcttcatgatttgaccaactaagaagccgattgcacgatccttaccattcttaaagtcttcaactgattgagggttatcatcaacaaccttcttaaccattggagctaaaacagaagtatctgacaattgaaccataccattatcttcaacatacttcttaggatcagtaccattttcaatggtttcagcgaagaccttcttagcaatcttagatgaaatagtaccatccttaattaacttgatcatttctgccaagtgttcaggcgttaacttaatatccttcaattcaacacggtgatcgttcaagtaaccattaacttgtgtgttcatccagttagctgccagagttggatctgcacctgccgcaacagcttcatcaaagaagtcagaactttccttagtttgaagcaaaacgttagcgtcatatggcttcaaaccatatttatttacatagtcatcgtaacgagcaaatggcccctttggtaattccttagcaatttcatcgatccattcttgtgaaatatgatctggtgcaatatctggttctgggaagtaacggtaatccgatgcaccttccttaacacgttccaaaacagtcttaccagttgcttcatcaaaacgacgagttgaaagttggatgtgaccaccagccaaaagaacttgttcttgacgcttttcttcatatgcaagtgaacgacgtacgtgatcaaatgagttcaagttcttcatttcaaccttagtaccaagttccttttgacctgcaggacggatagaaatgttggtatcaacacgcattgaaccttcttccatcttaacgtctgaagcaccagtaaattgaacaatcttacgtaatttttcaaggtatgcgtaagcttcttcggggtcttccatgtcaggttcagaaacaacttcaagcagtggaacaccttgacggttcaagtcaacgtatgagaaaccgttggttccgtgagtgttcttaccggcatcttcttcgatgtgcatttcgtggataccgattctcttcttcttaccgcgaacttcaacttcgatgtaaccatcacgagcaagtggttggaagaactgagtaatctggtaagccttggggttatcaggatagaagtagttcttacgatcaaaatgagtagttggcaaaatgtgagcgtgggttgctaaggcaaccataatacctaaacggtaaacattcttgttaaccattggcaaggtaccaggcatagcccagtcaataacattagtctccgtgttttgttcagcaccataggttactggtgaaggagagaaaatcttgctctttgtctttaattcgaagtggacttcaagtccgatagtcgatttaaaattcattcaattagtcctccattccagttggtgttttttcataaaacttgttagtgcgttcgataaagtcagcagtcttgaagacattaccttcatcaaaacgcttagccataacttgtaaaccgacaggcatcccatcaactaaaccagctggaacactagctgcaggaatacctgctaagttggcagaaatagttaaaatatcattgttgtacatcttaattgggtctgaaacttcttcgccaataccaaatgctggctcagtagtagttggtccaacaattacatcattttctgcaaagatcttgtcaaagtcatcacagatcaaggttctaaccttagcagcttgtctaaagaaacggtcatatgaaccagctgaaagggcaaatgaaccaagcataattctacgcttaacttcagcaccaaagccttcagaacgtgatttaacgtaaacatcaagtaagttcttagtgtccttagcacggtagccgtaacgaataccatcgtatctttgcaagtttgaagaagcttcacttgaagcaatgatgtagtagtcaggaacaacgtatttagtatgtggcaatgaaacctcattgatcactgcaccagcatccttcaaagcatcgatttgcttttgaataacttcacgcatttcgccgctaactgcttccatgtattccttaggaacagctacacggagacccttaacatcttgaccgataaacttggtaaagtcaggtacttcacgggttgaaacagttgagtcatgctcatctgcaccagcaattacgtttaatacttcagctgaatccttaacgcgcttagtcattacaccaatttgatcaagtgaagaaccaaatgcgataagaccccaacgtgatacacgaccgtaagttggcttaataccaaaaataccgttaaatgcggctggttgacgaattgaaccaccagtatctgaaccaagtgctgctacaacttgaccactagcaactgcagctgctgaaccaccagatgaaccaccaggaactttatctaaattccatgggttgtgagtagcaccataatatgagtgttcagttgatgaacccatggcaaattcatccatgttggttttacctacaaaggttgcaccagcttttttaagcttagaaataactgttgcatcatacattggcatgtagttgtacaaaatgtgactagcagcagttgtcttaatcccgttagtgatgatgttatccttaattgcgattggaatacctgctaacttactcttggagtagtcaaggttatctgcaggcttagcatcatctaaaacagtgatccaagcatttaacttcttatctgtatccttaatgtttgccacagtgtctttagctaacttatctgctgacaagtcaccgctggcaagctttttgtttaatgaatcaatattttcgtttaagtaattcattactcgtcctcatccttattaataattacaggaaccttaatgtagccgtttgccttttcaggaacgttagccatcaatgtttctctgtcttgtccttgccagtgttcaggtttatcttctctgaagacagtatcacgatcaacaacttgaactgtttcatcaacaccctcagtatcaacttcactaagttgatcagccatattgataattgatcccatttgatcagtaaatttatctaattcttcttcattaaacgcaagtcgcgaaagagtcgcaacgtgtttaatggtatcttttgtgatttccacgcaaatacctcctattcgccgccataaacatggacttgataatcactatcgccggtttcttttgcaactaaagcttgtacatcatctactgaaccaattttgatttcaattgggatattgccagacaagtactttttagctgacgacaaaaccaaacgggtaaaactttgaatttgttcatagccataaaattgcgttgttacggaaatgttttcttgtgaaagcttaccgtttgtataacgcaaagttgccgttaccccactaatattagggaagtagttttgaatagccgtcttgaaatcattgaagtgcgatgcatcatcactgttaattgctttttcactaccagttgtcggtaaaacttgcattttttccgacatggatttccatttagatattttactactattagcggccgctgtcccgtaagcgaagtaagttccaccaactaatgaatcttttccagtcttggagaataaaccaatcgtaatcggaatattctttaaagctttcttcttacgcaagcgagcaacaatttcattagctattttttcaccttgagctttttgttcagcacgtgaaatagtagtttgaaattctgcaccgttacgctttttctgataataatcaaccgaattcatggctaagcccaagctcataccacctaaattatacttggaaccagatccagtcaaataatcttgttcgataatttcttccaaataaattggattacgcgtatcggttccggtcttaccattatttactgggtttaaaccatcaggatttgatttggatttacgcattaaccaatcagttacagttgaggtatccaaatattgtccttcttggaagacgtattgattaggcgaaaattgattcttagaaatttgaatcagccctcgctctaattcacgcgtatcaacagaattatcattatcagtagctgttaatcctgcaatcggactaatattatagcgaccatttttcattaaaacggtatagccattcgttcccgtgttagtagtttgatagctttttttcttagtggttgaagtggttgtcgcattatttgctaaactagaatccttcaacttaccacaaccacttagagtaagcgcgattccagctaaagccattacttgcaaatattttttcacaataattgtcctttattcaatttgtgcaattgcttcttcttcagtcaaaagtggtacgcctaaagtctgcgctttagtatacttagaaccagcatctttgccataaatcacgtaatcggtcttatgcgaaactgaacccgtaactttggcacctaaagcttgtaattttttcgtaaactcacttctagtataatgctctaatttacctgttagcactacagtcttatccttaaatggattatcttcaatttctgcaggctcatctgcacctaagtaatccatattcaggccgctctcacgcagctcatcaattaccttctgtgcttctggttgagcaaaatatgttgtcattgattccgcgatcgtcatgcctattgtatcgatagaagctatttcttgcacgtctagagacataatctttgccagatttttaaacttttgagcaattaagcgtgctgctttggccccaacatggtcaattcccaatccagtaatcaataattcaactgagttttgctttgaattgtctaaggcagttaacaaattattgatcgatttttccttaaaatgatcgagttgtgctaaatcatctgcagttaagtgataaagatcagccacattatgcactaaatctttagcaatcaattgtttaacgatctttggccccaaaccggcaatgttcatagctggtcgagaagcaaagtgcgtaataccctcctcaacttgagctggacaagatggattgatgcagcgcaaagctacttcatcttctaggtgaactaatttttgcccacaggatggacaagtcgttggaatctgataagctacagaatctgccggtcttttagccatgacgacttcagagatttctggaataatatcgcctgctttatgcagtttaacggtatcaccaatcctgacgcccttttcattcaaataatctgggttgtgcaatgaagccctagctacagttgtaccagctagttgcaccggatccatgaccgcagttggagtaactactccggtacggccgacagtccaaacgatatcccgcactacagtttcttgttcttcaggtggaaatttataagcaatttcccagcgaggcaccttaacagtgttaccgagctcttgttcaattcctagatcatcaatttttaacacaatgccatcaataccatatgttaggctgtttcgtttagctgtgtattcatcgataaaggcaaaaacttcatctaatgtttttaacttacgaccggtttcattggtatgaaagcctaaatcatgcattttttgaattgcttggtgctgactagtaatttcttcaggcggattaacccaagtataaataaaggtactaagttgacgcttcttggtaactttaggatcaagttgacgcaaagaacccgctgcagcattacgtggattagcaaaaactactagaccttgctcttctctttctgcattcaacttggcaaaggcttccttgcccatgtaacattcaccgcgcacttcagttgttaacggttcaggcaaagtctgtggaatatcactaatatacttagcattagctgttacatcttcaccaacataaccgttaccccgcgttgaggcacgaaccaacttaccattttcatattcaagcgatagtgataagccatcgatctttaattccacgttatattcaactggatgaccaactaatttttgcatccgttgatcaaaatccttcagttcagctttggaaaagacgtcccccattgacagcattggaatcgggtgctctaccttggtaaaatcactatcaatctgtcccccaactctttgggtaatggagtcgggtgtcacaatctctggaaattctttttctaattcaagcaagcggttgtagctttggtcgtaaacattgtcttcaacctcaggcgcgtccttagagtaataggcctcagcccattcattaagctgttttctaagtgaagccgcttcttttttagcttcatcaagagtaatttctgccatttttccctcctgatccaaatcaatctttctttaattatatcttcttaattggcgcaaaggcagccaaaagccgtttgattcctttaccagggaaagcaatatccagctccatatcttcaccagtgccattaactttagttacaacaccatgtccccaagctttatgctcgacttggtcgcctacattccagcccttcttttcagcaccgacagcgcctgaagctttcttagcagtataaacttcagcgcgagctcgttcggctttgcgagcaaatggtgccgtctgtttctcaaagctagattggataaagctgctttgtaatttttcattttcttctttgtgcagatcctgttcatcaatttcgtccaagaatcttgaaggcggattattttgcattctgccatacatcatccgtgagtaagcattagttaaaaacagttcttgcttagcccgagtaattcccacgtaagctaggcgccgctcttcttctaattcattgtcatccatcattgcacgttgcaacgggaaaagcccatcttccatgccaattaagaaaaccactgggaattctagtcccttagctgcatgtaaagtcattaaagctacttgattgtcatcttcatcaagatcatcttgatcgctaagtagagatacttcagccaagaagtcgcttaatggattagactcatcttcttcgggctcataatgatcatcaaaacgcttagtaactgacaagaattcatccaagttttctaaacgcgtttctgattcaattgtattttcagctcgcaaggcatcggtataatcaaaatcagctaagattttttcggttaaaccggttactgtaccattttgagcataagcaattgcatcacgtaatttagtaccaaaatcgcttaatttcttggctgctctagtattaattgaactttcagccacatgtcccatcgcatccaaaatgttgtagtgattctcatccgcaaatgttaacaacttatccacagtagcggcaccaattccccgctttggagtattaataattcggttcatactcatcgtatcagctggattagcaactaacttcaagtaagccatcacatctttaatttctttgcggtcatagaatttatgtccaccaacgatttgataaggaatattgcttttaacgaaagcttcttcgactgttctagactgagcattagtccgataaagaattgcgaaatctttgtaagcccgttttttatctttaacttcttcttggatctttgaaatgatgtagtgagcttcatcatcaccgctttgggcttgatagtaggttaccttttgcccatcaccttgatcagtccacaagttcttagccttccggttctggttatttttgatgaccgagttagctgcggacaaaatgtgaccagtagaccggtaattttgttctagcttcacagtcttaacatcatatttcttgtaatcctgctcaaaattcatgatgttttccatattagcaccgcgccagccatagattgactgatcggcatccccaactacacaaatattcttgtattgtgcagccaaagcatgacagagttcatattgagcctggttagtatcctgatactcgtcaactaaaagataacggaacttgttttgataatagtgcaaaacttcgctatcttttttaaacaaaactagggtctgcataatcaaatcatcaaagtccataatttgatcacggcgcaatctacgttgatattcttcatacaccttagccgccatcttctcaaatggtgacaatgcactctgcataaaagcttcaggatccagcaagtcattcttgccattagaaatcgcggctaaaataccgcgtggatcatacatcttaggattgatattcaagtctttttcaatatgcttaaccaaagttaattgctcggccgaatcagcaattgaaaaattatgaccataaccaatcttatctgcatcccgacgcaagatccgcacacacaaagcgtggaaagtcgacatccaaatgtcgttagctgctggtcccagcaacttttgttcacgctcacgcatttcactagccgccttattggtgaaggtaatggctaaaatattccaaggtgcaacatgattttcttcaactaaataggcaattcgtctcgttaaaacagaagtcttacctgaacccgcaccagcaacgactaataaaggtccttcagtggtttctaccgcttctttttgttgcggattcagaccagctaagatagatttttcgctcattattttccccttcactaaaaattatttcattaatgcaacttgaatattataccaaaaaagcagcgactaattcgctgctttagatttacttatcatatttttcaagatcaaactgttcaatcaaattaatcagcttatcggcatagtccggatcagtcgcatagccgtcggtaaccaaggctttagcttgtgtcttataatctttggatgctagaacatgcttatactgatcgtggttccacgttgtcccattctggaataatctagcgtgagcccgaatagaagcctcatatgagtcatatatttggaaacgcgccttcacggtaacccacttattctttacatattccttagttgtcatcactgccgaagtgttcgggttggatcctttaacaccaaaaagattgttgtatttttgcgacaaatcactttgtccataattactttctaggcaggcttgagcaatcgtgatgcttggcaataagtcatacgacttgtccacttcgcgcgcaatcggaccaatttttttgataaagtcttttttctgttttaatagttttgctgcttcctgttctttttgcagctgtgcttgttgaatctgctctgattgaatcgcgtaacgcctataatatctaaagccgacaaaagcaaccatcagaataaatagaattacgaatacacgcacaacggttttgacactttttggtactcttgatttacgttttcttgccatagttttattccctttaattactaattaaagtataaccgatttttgagtaaaaaaaaagaagtcgctcactgcgactcctcaatcagtgcgggcgagaagactcgaacttccacgatctaaagcgatcacaagatccttagtcttgcgcgtctgccattccgccacgcccgcggcacatcaactataatagcctaaatacagttgagatgcaagaaaaaatataaattattttaaatttctgatcattttacgcaaaagtttgcgctaaacgcaggtgtcccctacatttaccacaacgatacttttgtgtattaatcctgcgcattcttgggtatctcaacccacagttttcacaaagatataggtaacgatattttttctttttacgtaagccaatatcaggtgcataacgactgcctccaacttttttcagcaagattttaaaattgcgatcacggtgtcggtaacccaagcccaataaatgcaaatgatagtgggttaattcatgcttaatgattcctactagataatcatgatattgtggtactaaaaaatgcgcgttgatttcaagatggtgatcatccaaatgataacgcccacctgttgtggtcattcgccgattaatttttacaaggtgcttaaaagggcgatcaaaatattttaacgaaattttttcaactaaattttgtaattcattctcattcatggataaaattttattccaaaaataaaaatcagcaagaatttaatctcgctgattttttgctacctaaatatcttggcatacatccccgcctgcttaggcgtactaatgtgtcgtttcaagaaagttactaagtcatgtttgaatgactttttaccatccatccaggttccagtgaataagtgaatcgatttggagtccttagaaggattacacagaactccatctgaatagacatgaatgccatcttttaacacttgctcctgattacctagctttaagccatacttatttaccagcatttcagtaacggaaatactatttactcccgccatctgattcttagtgtcatattcaaaatcacgatcttgataataatccaaaatatcctgcataaatgggtggcctttttctgcaccaaaaattgcagctgacagataatcatggttttcaaaaccaataaaggcagaagcattcaaaagactatctaacttatccacgactctaacatcagtatctaaatatatcccaccttgttcataaatagcccgtgctcgaacatagtctgacacgaaggcccatttttttgcagcataagcttgttcaatataacgattctcatgcatatcaaaattatcttcattccactcaataatttgataatcaggcaattttttcttccaggttgcaatacattcttcaattatcggggatttaggattgtgtcctacccaaacataatgaatttttttaggaatcatttttaacctcgcttcaaaaagttcttaattagcttcacaatatcatcattaaaatcaagcttgaacaagaacatcaatgtcagataaataattaacatgacaattgacttaaaagccatattgaaaaaggcagacggaattatattaggcataaacattccaatagccaaggttagcaccgcaattaacaaatacttgggcacgtcatggaaaacataactaaattcatagccatcacgtacaacccagagccgcaaaattaaaactactgcttcagtaattaatattgcaatcatagccccaactgcgccatatggcctatctaagagataactcaagacaatttctaaaattgccccaataactactggcacagcataatccttgtctcgctggttagccaaagcaaattggttagccaataccccgccagtcggaatcatgataattgttaaggtaaaccaaaacattaatggagtcatcggaacatatttattaccaaagaaaaacggtacaaactgcttggtatttgccataataattacggcgaacaaggtacccagcattacagtagcttccagtgattttttcatcactatcttttgtgccttttttccttcgctcgccatcttaggcataatgactagcgaaatactggtaattacacccagaatcatatttgaaattcgttgtgaattgtcataaaaagaaacctgagtcgaattagaaaaccaacccaaaattggtttatccagcgaagtataaatttgagtcgcaatctgtggaatcatcaaagtaccaattgcaattgccgtctgtttaaatttgtaaaaatgagcaacgggttttcctacatagcgccaaatatcaaaccaaaagacaaaggaacctagcattgtcgacactgacatgatcaataaatatttccacaagtcagcgggtgattttacccataataaaattagaaccacactaactaactttaccgccatgtttttcaaaacaacacgaccaaagtcagccagtccttgaaagaaccatgaaatatcaacctgtgctgagatcaagtatggcaccatcaacaagatataaaaccaatattgaacgtgaaatacagtcgctacaaaaaccgtgactaaaatggtgataataccggcgattccttggaaataccataacccccagaaagcattggttagctcctgcggtgtaccataagtgcgcgtccgtgaaattgttcgcatccctacatacgacacagacagaatacaaaaaatcatcaagaattgcactgtattgttcacactgctataaatcccataagtcttaggacctaagacacgcgataaatacggtacagtaatcagtggcaccaatacaataaaaatctgataaaccgcattatataagatgtttaaaaatgttttacgcattttaacctcgatattcctgcgtcatgtacttaaagacgttctcacaatatgaatcaccatgcacctggttagtcaaatgtagccagtaaagacggcgattagcaatctgctggttatcaagttgatccagattgcgaattagttcatcctctgaattaacacagattccgggagtaatctcagcatatggtcccattagtaatccgcgcgttttttcatattgctctaaaaagttagtcacaaacacaatcggtttgttcaagtgcaagtaatcaaagtagattgacgaaaagtctgtcatcaagaaatcagtatcaccgagcaattcgtacaaatcataattgtggtcaaacaagtaatcattgttcatgaaagcaatgttagaataactgctcttgaaattggcaaataaacgcatttcatagggatgcaattttacaatcagatattgatgccgcttctttaattctgtatttaatttttcaacatcaaaatcccgaaaggcaaaaaagtttctctctttgattttctccataatggatttatcttccaattcataacgaaaagttggcatatagatcccgatctgtgcctgatcgtcctcagttttaaataagtcagccaacaattgtttcttcgaaattaccggcttagccaataaatccaaacgcggaaagcccagcttgcggtatttttttgtctcaattgccatacaagcactcattagtgattcatatagatcagagctagaagcaacaatatccgcattcttgtgccacaatttttcgttacggcgattgtcgcgtcgcttagtattattagccataattcccatgcgcttgagtggaacgccatgccacaactggacattaatttgatgcttgcgcaccttaaatggttggtgcgttgtaattacatatcgcgctgctccgattttctgccaggttttccacttcaagtgtgacgatggccacggctcaactaatgtaacgttatattcaggatgattcaattgcagccacttgtaaaaagcatagccgttagatccagacctacctgaaccattcaggataaccacattattgttttccatcgtggtaaatctagccaaaaaactcatccaagccaaataaagacggaataaaaagcttttcattaaaatacttccttaaaatagtctaatacctaaagcatataaaaaaagcttgagcaaactcaagcttttttctttatttttgttaaactttattctttacccatttttctctggcagaatttaacaatttcaacaatcaaaaccatcaaaattccggcaattaaaatgactaaccactgtggtccatcaagttcagtcacatcaaagaacttagtcataaatggcaattctaccgctgccataattacagcagcaatgataattgcaccattgaaccacttgttagaaaaagtatgcggtctaaaaatcgactgatgtacatacttggaattaattgcatggaacagctgaatcaagcccaaagtcaagaaggccattgtcaatgcatccccatgttgcaacgatggatcacccacatgtggaccgacatgcaaaccaatttggtatgcacctaaaactaaaattccttccaaaattccttggtaaataattgaactggcaacaccaccgctaaagaagttagacttcttaccacgcggcttgcgcttcataattccaacttccactggttcaacacctaaagcaatagctggcaaagtatccgttaccaagttgatccacaagagctgcacaggagctaagatatcccaacctagcattgtcatcatgaaaactgttaatacttcacccacgttacaactcattaaatatagaatggccttttggatattactgaagaccttgcgtccttgctttactgcttcaacgatcgtggcaaagttatcatcagccaaaaccatatcgctggctcctttagaaacttcggtcccagtaattcccatgccgattccgatatcagcttgcttcaaacttggagcatcgtttaccccatcaccagtcattgcaacaatcttgtcattagcctgccaagccttgacaattctaaccttgtgctctggtgaaacacgagcgtaaacgctgtagtcaccaacatgctgtttgaaatattcatcatctagtttatcaagttcagccccagttaaaacgcggctatcctgacctttttcaataatacctaggcgttccgcaattgcttgagcagttgtttggtgatcaccagtaatcattactgttctaataccagcactctttgcttcagccacggccgctttagcttcaccacgttctggatcaatcattccgactaacccagcaaaaattaaatcttgttcaacattatcagttgttggatcggtgtacaattggtcgactttcttataagcaagccctaagacacgtaaagcttgttgcgccatctgcttgttttgcgctaaaatattttgcttctgcttatctgtgatcggctctacttgaccaccattttcaatcctagttactcgctgtaacaacatatctggtgcgcctttgaccgctacaaagtattgctcgccatctttattaacagtactcatcaatttccgttctgaatcaaaaggcacttcttgaatccgtttgtatttttcaagcaagtcagttacatcaatgttttgatcaaaagcaaattgaatcagggcggtctctgttgggtcacccaataagtctccgccattttcaatcttagtatcattagccaaagtcattgccaataaagctgggttattttcgctaatactttcactattatcatgtaactttttatcatagaagaccttttcaactgtcatccggttctgggtcaacgtaccagtcttatcagaacaaataatgtctgtagcacccaatgtctcaacagcaggcaatttacggacaatcgccttatgtttggccatcgtttgcgtacctagtgccaaaataatcgttacaattgctggcaagccttccggaattgcagctacagccaaggaaacggcaaccaagaacatgttaatcattaaagtagagttacgctctgctgaatcagccttgagcactcctacgataaagacaataacgcagattgccaaaatcatgatggttagggtctttcccagttgattcaagtttcgctttaacggtgtatcagtttcatcagcattgttcaacattgtagcgattttaccaacttcggtgtgcattcccgtactagttacgattccttcaccacgaccataggtcacattagtattggaataagccatatttacgcggtcagctaaagcaatgtcttcaccttctaaagtttctgcatgcttttcaactggaactgattcaccggttaacgctgattcctcaatcttcaagctgtgggcttgattcaagcgtaagtcagcaggaaccacatccccagcttctagtaaaactacatctccaggaaccaattctgtgcttggaatagtaacgattgtatcatcacggcgcacatgcgcatccggcgtagccatttccttcaaagcatcaatcgcagcttcggaacgtgcttcttgaaagacacctaaaattgcgttcaaaatgaccacaatcataataattgcggcatcagtccactcatgagctaataccccagacaaaatcgcggcaatgatcaaaacaataatcataaagtctttgaattgatcaataaaacgcatgaacatgctttgctttttcttggaagctaaggctttcggaccatattgctctaatctagctttggcatcactagcacttaacccatccttaacggacgtgttaagatctttttcaatgtcggggatcgactcgacataatattttttcgccattttccctctgctatataaaacatagaaacatgcagaagtttgatattttccacataccagaaaaaaatatatttttcctttcctaattttatttactgtcgtcatcattggtattccgatattccatctggggagtaatcgcattgaccaactcctgcagcttaagggcttagccagccccattattttttattttgttaatgccaataaatttaatactgcattgtcatcacgatcattgctatagccacactcataacaaacatattcattgtgcttggtgccatgttttctattgccctgcaaagtgattttgtctgcaccatttttgacatagccgcaactggcacatctttgcgttgacgggtagcttctatcagccaaaattagctctttatcataccaagcacatttataggataatatctgtctaaatttgccaaacaaggacctctgtatgcctttggaagccacatgcgtcatcatcatttgcttgacattcaagtcttcaatgacgatttggtcataattatttgccagctcagtagtaaatttttgcaaaagatcattctgaatattgacagccctgcgataatcacgctgaagcttggttctcacttgcacgtaattattgcttcggccagccaattttccattaacccttcttttcttggccaatattctctgataatgcttgatccgcttgtacagtttctgcagtcttgccggcaaaatattgattctgccctcagtatagctgaagtgcccaacgttgacatcgatggcggtctttttgccagttttaacctttattccagctttttcttcgtaggaaagagcagcgtaataatggcctctttctctaaagatgctggcaattttaacctgtttcatcctcaatgcttcatatgttggaatatcaaaccatgatttaattcctctgggcttatccagtctgagcttgccattaataactttagctcggtcagtcttaaaaccttgacgtggagctttctttgacttgaaatgcggcttgccccagtcgagctgggctttgtcaaaaaagctcttccaagcgttggccaagtccttgactgccaactgcagacaacgagcagacaaggtaaactgccaatcagccttgttattgactaattcatctcgcacccgacactcattaggactaggattattatccttatttaaagtccgtgcttcatacatatcttgccaggtttctaaggctagattccagcagtatctgcggtaatcgcatagacggtcaagttctctttgcatggtcttgtttggttttagctcagctacctgtgttttaatcatttatttcacctccaatgcaaacataagtttagcaaaggatgaaacaaaaacaagcgaacaaaatattaaatttttagcagcagctaatttgtttctatgttttatcttcctgatcaaattaactgcatctttttctatttattgctatcaaatcctatcttttagtcaatcattatttcctcctcaaaaataaaaaagagacttacatgcttgtagcacataagtctcacgaattaagataaatccagaagtatcttacttcggctgttggattcatcgcaagcaattgctgttactcccttatgacaagttaattataagcaaaattttagctatctacaagttttagcgaattgcttttactttttataaaagtcatcaaagacagtaactggcaaatgacgcttgtgtttactcttattccataatttttcaatttgatcagctgttttatctgatacttccttaccttcaaggtaatcatcaatctcttggtaagttacaccgagggcaacttcatctggcaaatctggcttttcttcttcaaggtctgcggttggagccttttcatataaatgcttaggacaacctaattccttaagcaaagccttgccttgacgcttgtccaaacggaacaatggcgtcaaatcagcggcaccatcaccaaacttagtgtaaaagccactaaagttttctgcagcatggtcggtaccaacaacggcacccttattagcaccagcgatggcatattgaactaccattctttgccgcgccttaatattgcctttgttaaagtcagtaatcttttgaccagttgcttctacaaccttcaccatagcatcaactggttccttaatattaacaattaaatcctgatctggcttttgaaaagcgactgcatctgcagcatcttgggcatctgcttgaacgccataaggcaaacgaacagcgataaattgataagaatcatcgccagtttcctcacgcatttcttcaattgccatttgacacaatttaccagtcaaagtggaatcttgaccaccagaaatacctaagacgtatgacttaagaaatggattagcctttaaataatctttcaaaaaatcaattgaacgtctaatttcttttttagggtcaatttctggtaaaacatgttcataagtgataatttctttttgtaattctctcatcgaccaatgcttctttctctaattttacgccgaatgtcttgaatcaaatccatcttggattcgtataagttttgtgataaatccactggatattcctgcggattcaggctacgcttatattcatcccataaaccatcaaggttgtcagcacagaattttttaatttcatcaagactaggttgatcataaactaattttccatctttaaaaatatcatgtaaaagtggaatagcagtgtaatcagttaccaccttattaatatagttatattgtgggtggaacatgaagagcgcgtcaaatttgcgtggatcttcattataccgagatacccagtcaccttcatttttcttagcagtgtttgcgctaatccgccatacttgttttttacctggggtggaaactttgatggcatttgaagaaatcttcaatgtatcccgcatggcgcctaattcatcttccatggcaaccaacttgtaaacagcaccaagggctggttgatcataagcagtgatatacttggtcccaatgccccagacatcaattttagcgccttgcatctttaagttagtaatggtgttttcatcaaggtcatttgaagcaaaaatcttggcatctggatagccagcatcgtctaactccttacgaacttgcttagaaatgtaagccatgtccccagagtcaattcgtacgcccaagaagttaatcttgtcgcccatttcattagccaccttgatagcattaggcacaccactacggacagtatcgtaagtgtcaaccaaaaaaacacaattcttatgtgtttccgcatatgccttaaatgcgtcatattcactgccaaatgcttcaactaaagcatgagcatgagtccctgaaataggaataccaaacaatttaccagcacgaacattactagttgaatcaaagccgccaatataagcagctcgagcaccccaaatggccgcatcggtttcttgcgcacgacgagagccaaactccattagaccatcatctttaacagctaacttgattctagcagctttagttgccaataaagtttggaagttaataatatttaaaatagcagtttcaactaactgacactgggcaagtggaccttcaacttgcaaaattggctcgttagcaaaaaccagctcgccttccttcattgaacgaatagtgagctttaattttagattgcgtaaataatcaataaagtcatcatcgtaaccttcattttctttcaaatattgcaggtcactttcggtaaactttaaattctttaaatagttaatgatgtgttccaaaccagcataaacagcataaccgttgccgaatggttccctgcggtaaaaactttcaaaaacggcattgcgatcagcaatccctttcttgaaataggtatacatcatattaatttcgtataaatcagtgtgtaaagccaacgaatcgtctttggctaattctggataaaacattgcttctctttctgtcattaaaaattaacaatttcgtttttcattatacagccattacagtccattggctattctcaaaactatttttacctcaaaattagatacactttttcaattgagtccagttgatttttaatagaaaaatgctcttccgcataccgcttttctgtattagccatctggcgtaactcttcatgggttttattaacggccagattaatctctttagcaattgaatcaatgtctcccgttttagcaatgaaaccatattcgggtcctggaatcattttatgaatatcacctacatctgtggacaaaatagggattaaattgtctgttgcctctaaaagcacaagtggaaaactctctgaatatgaagttaagacggctagatcaattcgcttatataatccgctcaattggtgttgagtcataaaaccgtgaaaagttacttgtggtgccatgtccaattgccgcgtcaaggccttcaatgcttcaagctgactaccatcacccgcgatatgcagacgaatatgctgatcatctaattttttcacagcttttaagagcaattcttgtcctttaaccttttccgtacgagcaacgttaataatattaaaataggtatgttcatatttagctggaatttcactatcactgtggaaaaagatgccattatagatgacatgtaccttgtttttatccacatgtgcgcgattaattagtagcttggcaaaacgctgagttactacgaaaatacaatcagcttttctcaacgcacgtaaattaagtttagtaaaaatattgccaatgattcccctaccttcaaagtctagataaggatctgaatgtacagtaatacaccaagttgcacgaattcgcttgtgaatcaaagataaaaataagttggcacgcgcaccatgagtatgcacaatatcatagtgcccctcattgataaacttagtcagtctacctaaactgcctaagtcataacgactattagctcctagcacatgtgtagtaatcccagccgctcttgctgcttgtgctactggtccttctgccagcgttaataattcaaaatctttgccttcatttttggcttcagttaacaaattaacaatatgtgataaaccgccgccattttctaaaccagcatttacatgcaaaaccttcatcttagtaaaattattttcccttcttttttgactgtttaactcgcacaacaaactgtggcaaaactaacatccgcttaaatctgctaggattagtaatcaagcgataaaaccactctaaatgcgtcttttgaaaagcttctggtgctcttttaacgatacctgaaaagacatcaaaactgccacccacacccatcatcaaagctggtgtttcgttcttacgtaagattgataatagtttttcttgcttaggaaaacctaatgctgcaaaaaccatatcgggttgtgccttctgaatgcgccgtgccactagttccaaatcttcagtaaagtagccgtcttctgcaccaactagattaatatttgagtattccttagcaattttgctttgtactgcatgaattacttgtggcttagctccaattaagtaaactcggctaccacgatcgctagcaacatccatcagccaagtaaacaaatcatatccagtcacccgctcaggtaacggctgcttaagcattttagctgcttttacaatgccaatcccgtcagcagtaatataatcgggatcattttttagaattttcataaattcaggattctcgtttgccgccatcacaatctccggattagcggtcacaataaaggtcgacaggtgattatttagtcgattaataaattcattttggaattggttaaaagttttattatcaaaatcaacacctaaaatattaactttgctcattttcacacctcatgcgttttcttatctagtttctattctaccattccgacacgcaagtacgagaaacatgttcaagttttatattttattcaaacatgataagattgttttaataaaggagaaaaaatgaaaagagttattacctatggcacctttgacctacttcactacggtcacgtgcgactgcttaaaagagctaaagaattgggcgactatttaatagtaggtttatctaccgatgaatttaatgaattcaaaaaacacaaggaagcctacaatacctaccctgaacgtaaatacattttggaagctatccgttatgtcgaccaagtcatccccgaaaaggattgggatcaaaaaatcaccgatgtacaaaaataccatatcgacacttttgtcatgggcgatgattggaaaggaaaattcgacttccttaagccttattgtgatgtggtttacctgccaagaacgccaggaatttccactactaaaattaaagaagatcttaaataaaaaaatactccaattccattcaatttgaatgagattggagtttttgtttacttagaaaaagtgaattcaaatcgttctgcaacgtaacgtgcgcgggtgtattcgaatggttgcccatctgctagttcagttacctgtcgtctagtaattaacggttcaccttttttagctttaagaagacgcgcatcttgctcgttggcaattgatgcagaaatatgttccgtcactcgtccaatggcaaaaccaccgcgcttttctaaggttttatataagtgcgttgaaacatcttctttagaaaaattctttactaagtagtatggcaccgttacgacttcataacaaattggtgtcttatcagcgtagcgaatccgctccatccgcaaaacgttctcattatcttttagcgcaagacgctctttttcagataaagatggattgccaatctgataagaaattaacttacttgaaggaacttgaccattagccttagtaatctcagtaaaggacataattcctgacattttttcttgaaccttttgactagctacataggttccgctacccaagcgccgttctaaaattccttcatcttctaatgttttaatcgcttggcgtaaagtcattctcgaaacgccaaacttaactgccaattgacgttctgctggaatacgatcccctacttgataaacgtgattctcaatatcacgcttaatctgattgtgaatcttgatatacatcggttcttccatagtcgccacccccaaagtttagtactgctattattataatctaaattggtctagcttgcattaataacactgcttcaattttacagactattttttcttagcggtccacttcactccaagaatataaacatttggacgcttgttatattccacttcaacttgttcattatcattagcaactacactggcactaaattttgcttcatctttaacagctaagttagcctgattaggattcagcacaatattgtggcccttcatattagcttcaccgctcaaagctaaaaagtactcatagttcatatttccagtgaaggtaacacgtgtagcatcacatttcgcctgatcttgaaaatctgcatgagctaaaattacggcattgttcattgtaacttttgcttcatcaactactatcattcgattgatggttgaattttgaatgattgtccgtgtctttttatcaatataaaccccacccaaaaaagtagaattcataatattgctccagcagtcatcacttaaataaaagcaggaatcgctagcagacttaacttttgaattaagcatattcatccaagtttgcccatgcagtaatacataatctacttccgaattattaagatccaactccgcattcgttttggcaaaagtattaatactgccgtgaatctttgaattatttacaattgctgttccttcgccttcaattgccaaagcacaatatttgtccgagaaataatcaatttctgaatcattcatttccaaacggaaattggcatggtcatacatggaaactgaaccgttaacaattttggttgaataaagttccaacgtgatcttaccattaaccgcgatagctgctgtatcagttcccgtgcccttaataaagcaattacgcaaagttaaatagccatcaacgcctactggtacagataggctattatgttcggtagttgtatcaatgcataaattttctaaagttacataacgactatcttctgaaacactaatatagccataaatagtcgtgtcttctggcaaagagcctgttcccttaattgtgatatctgttagtgtgatgccctgcggcaaataataatatccggggcccagcatcaacacatcatcggcacgcaaatcctttaaaacctcgtgccaactgactgaactgctagatccccctactctaattatcctagccatccattatcctttcatctcgtaaaaaccgattactattgtactaattttctttaatttatgttgtatttttgctcatcaaaaaagctaggttcgattcctagcttcttatactatttcattttaacattccagtaataagccacattaccataaggagaaagttggaaacctttcactctcttattcaataagtatgacgtaccttgttggaatagtggtgccgcaaaggcatccttttgaattaattgtttttcagcgttaactaaggcattcaatctcttctgcggatcagtggcataagttgaacgagccaagtcaatttgcttccagaaattggcgttgtgataatctggcgctaaattaaacaaaccaccaactgtcaagaaatcaattggatcttcataacttggctaccaagttccgtaaacaaagtcgtaattgtgattagttgtgttagatagccgtgacttcaaaggaattgaccgtacccgtagagttagaccaggtaaatttttcatcaaattgctttgaataaattcacccacacgcttagcatcgtcaatatctgaagtaagcaattctaaggttagcttcttcttacccaattgcttcaaaccaagttgccattcctttttagcttccttggcattataggtaaccaagtcgccagcatccttgcggtaatcgttgccagttgcctgatcggtaataaagtttgcggcaacaattccatttgacaccttgccttgatgcaaaactgtcttgactaactgttgcttattaattgcccggctaatggcccgacgaatatgaacattgcctgtactcttacgcttcaagttgaaagaaagataaccattagttggcgtaactttggtatgatagctagaattattttgatactgcttaacaaaatcagaagtcaatgtcgtgtaatcaagttcaccacttctgaacaagttaaccccagttgaaggagtttgaaccacttgtacgttaactttattcaaatcaacaattttcttgttccagtaagttggatttttcttgtaagtccacttcaaatttgaacctgtccaaccagatacggtaaatggaccattgtaaactagattcttactgctagtcccatacttagagcctaactttttaaccaatttagaattctgaggatagaattgtgcaccctctaagatttgtggcaaatatggaattggattagctaatgtaacttgcaccttatacttgccgagtgctttgattcccaatgaatttaccggtgctttaccttgagaaattgcctcaccgtttttgataatggcataagaatcggcatctaaagatgaattttttgggtcaacggttctgcgccaagccgttacataatccagggcagtaactggatcaccgttagaccacttagcattattgcgtaaggtaaaagtatagaccttctggtctttagaacgttcaacttttgtcgcaccagctaattctggctgatttttcttattaaaacggtaaagaccttccatggaattctgcaaaacttctgaactagtcgtatctccatacttgctcgaatctaaagttgaaatttcatttgtgacagaggtattcattgtcttagtcggtgcagcattactgtcattgttagagcaagctgccagcaccaatgcggcagctgctgtcatcactcctgaaaaaatccattttttacgtctcaatcttctcaccctttacttactttttgtttaatacttacattttacaagtatatctaatacggaagaaatttcaaatactttttccgtataatagctataatcaatacgtatacaaaaatggcaaaaaaaagaaacgtcacataggacgtttcttttttcgggttgggtgttcttttagaactattgggttagctggattcgaaccagcgcatgatggtaccaaaaaccattgccttaccacttggctataacccaataccagctgaactttttacttgtcgttcaacaatggaggagggtggattcgaaccgccgaactcagagagagcggttttacagaccgccgcgtttagccacttcgctactcctccgttagctgacttaattataataacgaaaatccaaatcaaatgcaagacttttttgaaacttttttcaaaaaaaagaagaagccatgacgacctcttctcaaaatttaaaaattgatttatatctaaacagttaattttaagcctaatgccttttgtgctacttgatttaccagactccattgcttgtcataagttggtgaaaagaagaaatctgcttctgctaaatcttccagtgtcaacttatttctaatagctaagctcaaaacattggcttggccactaatgtcatatgatgaaagtacgctaccgcctaagatttggtggctgtcttcattataaacaacagcaatatagcaagtaggattatctttttcaggaatatagtctggacgaagataactctttaagactgtttcttttgcattaattcctgctcgcttggcattcttttcactgagtcctgttgttactgcatgtaaatcaaaggcttcaagcaattgtgcaccaactaagcccttaaagacacgttctggcttgtcttcaaataagtgctcaacaacatattgagcctcatgccgtgcagcaatggcagatggcatcggtactcttctgttagctggaatgctaaatgggaagattgcatccccaattgcatagacatcctttacattggttctaaagtaattgtctaccttaatgtagccattgtcataaagatcgatcgtgtttttcaaccaatcagtatttggcttaataccaactgtaataatgacacaatcagcagtaatatcacccttatcagtctgaactgcattgacctttccattgccaacaaagccagtaactttagtgttcatagccaggttaacaccatgatcagtcaattctttttcaaataagctagtataagtatcattcaaataattttctagtggtttttgcccaccgtcaattaaagtaacattcttgcctgctttagcgaaaacctcggcagctgcaattccgttaccagcaccaataactgcaacatttttaatagcttcatcttgagcagctgcattgatctctgtagcgcaatcatagcctctcatcaacataatatttttcaggtctgctccaggaagaggcaaacttgcggggttaacacctgaagaaataattagcttatcataactaacttctttggttgtaccatcttttacgtttttgacagtaaccgtctttttagctggatcaagagctgttactgctgtgttattaacaactttaccaccccgttcaactagatcttcaggagtaaagtttctaacgttgtcttggcctgtagtttttccttcaaggaatagcttcattccgcaagacataaaggaaacgaagtcgcctgcttcataaatcgtaacgtctacatcatcataacgatctaaaatttcataagctgcctcttggccgccgtgggatgcacctacaataatgattttcttttttgacatagcctgacctcctaataatgcagcaataattgtcgtttttaagtaatagcagttattgtaactggttacattatttatcttttaataagatatttcaattaatttgcttttgattagtgcgaagcagcaatatattttttatataaaaaagagcactactgatagtagtactctagagggaaattttccaaaattatcttatttagctaattctgctgatagatttcgttcactaatttagtgatttcattacgattaagaacttcatcatacatatccattgtttcctggattgtattttctaaattagtaccatgatttttggcatagccaataaacttttttgcatctactattttagcttctttaatcgctttttctgcagctcttttagcaacttcattcatctcatattctggcttattcatgtcttcgacccattttccgctattcacgtagtagtcgatatccttctgcaggctgatatccctgcgtagtacatcatccgtttttctagatcatttttacgtgttgtttgcatctcaatatcatacactcgactttgatcatcttgtgcccagatatctaagcgaatgtttttggattctagtccaatgttgccgtcatactgggtaatgacattaacttttgtcaattttaattcaggaaacatccgacgtagcagttccagacaattctttttattgctcataacatgaccgaataccaagtcgttagtaattcgaggatatcgattaattcttctcctcatattttacctcttttctttttcttaagtaggaaaattaccctccactatttattactcaaaaaagtgcaaatttttcagaaatttaaaaatttagacacgaaaaaagccgatgcaaatgcatcgactctttcagttaaattattctactttttaatagaagtttacagccttgatgtaacgcttgttgttgtttctgcagccttcaattctgtagtacttcttaccgttcttaaatctcatttgaccaccgtaagtagttacagtttgacctctgtacatcttaccagtacctggagtacgacggtatgatgaccaataaatgtaggcattgtgcttaaaagtacgttggttaccagtaatgttggttacacgaacgtattcgtccttgttagccaccttgtagtaagtcttaccgttgatagttacaacagttggaacgatttcaatgtcgttgtaagcgtagtacatgtgacctaagtagttaccgttcttgtcataagctcttgaatcaaccattactggcaaagtcttggtgttagtgtcaccagctggcttaacaagtgatgaagtcttaacccaaatgttgcttgagttagcatctgacttagacttagttgaaacttgtgagtatgatacattgttaagggttctagtttgatcagcaacgtaaacagtgtcaccatctttgaaagtagttgaagctggtcttacattaatgccataaatgtggtaagttgcgattgagcttgcgccattagcatatagagcttgtttgtggcttgaagtaattaaaacagtgtatgttgcagtagtcttcttaccagttaaaccagtagcagttaaagttacattatagtaacgtcctgcttctgaagtattaacaggatttgaagttgcttctagtgaagcagctgtattattattgctgttttgtacagctgaaataataactggctcaccattactatttacaaaattagttggattaaattgtgaaccaacagctacttggaatatttgaccattaacactccccttgctttgaccattcaatgaccaattgatcactggattttgagtagtatctgtagttgaacttgaacctgaaactacaactgggatttgaacagtagctgtttgcgtagaagtagaacctgtaccagttaaagtaagattgaaatcactagttggtaccgcagtaatattcttgttatctttatcaagagttacacctgcattcttaagaatagcagcaacttcactatctttaaggttaactttttctccactggcattattcgtactaaagaaaactaatcctaaatcattaattgccttagtaacactagctacagtatctttagccttaatagaaatagtagttggtacaacattagctgttttatcggtagtacttgcagcatcaattacttgattgccatatgtaaagtatgatctatctgttggctttgctgttgttgctgtagtagtacttgtagtaccagtagtgttagttactgtacctaaactaatagcagcgttaactggaacagctgaagctgctacaggagcaactgccaacaaagcggcagcagccatacttacaattcttgtattctttctcataattatgtggcctttcctttctgaaacagaaattcatcctaagcagtaagttatatcttcttctgcttgtgaaataattatagcatgttacgaacccgattactaaaaacaggatcgactcgtgtgtgtgattttaagaatacctcctaaaatcaccagtaataccctaccctttatttgttaaactgtagttaccggacttttacaattaagattcaaaacattacatttttgtgaagttttaaacaagttattgatttatgacagaacttatgtgtgttaagaaaaggtaattttaacacttgttcgcttaaaaaaattaaagctcttagattttttgattagaaataattgcttcatgttctttaatatgctcaactcgccctgcatcccccgcaataagtaacaaatataatgcctcaatcattgtcatacttgccacgcgtgagaaataatactgcgattgcatcaccgtctgccgcactgctgtctttaaatgcacatcagctaatagcgcaatcggtgaatcatcgcgattggtgatcgcaatcaccggcatccctttttgtttggctaccttaatttgcttaatgattcccgctgcttcacctgaattcgaaatcaccaacaagcaatcctttttactcaggttcattgtctgcgcaattgccgtttcaatcgtgccacctgaatcaattgccaacaagccaatctgattaaacttatacactgcatcagcggccaccggataagtatcgccctccgcactaacctgcacaattctgctttcagtcaaaaaatgcagcacctgatctaatttggcttcagtcacattctccaaagtcgccttaatctcggcgactttatttttttcaatcaattccaaattagcactagcatcatcacgtgacatattttgaagtgacacactttcagttgcattctgagctagttgaatttttaaatcatgaaaacctgtcaaatctaaattatgacaaaaacgcgtcaccgaagcatcactcacctcagcttcagttgctaattttgaaattgtataatttaccacctgttcgggctgttttaagatcacttgagcaatcttctgatcactggctgacattgtcgctaatttactatagattgtatcgataattttagtcattattctcaccttttctgtgccaaaattatatcatcaatgtaattaattttcacaattttatttttaaagaaaataaatttatattttgattgacgaaaatcatttaccaaggtagtatgtatttgtaaataattttcacaggagaaaataaaatgaaaattaattcgataagtgacctcgctttaagtaaaatcaagccgaaaatgactatttctcttggcggcggaagcaatgtatttaagttatctcaagcgattgcacagcataacttagacatcacattatattctccatccgaacttactcgctttaggtgcaaagaactcggattagagcttcttccatctactgcagcgactaagatcgatattgcttttgatggttgtgacagcattgataagaattttaacgttctaaaaagtttgggtggaattcatctttttgaaaaacaggcagcacaaattgccaaacagtttatcctactcttacccagtcaaaggatacaaccgattctgaatcctaaaattccactttgtcttgaagtggcaccgccttgtgttaatcaagtacagaagtatttaagcagtttacatttaactagtaagattcgacaagatagttcagtagctgcatttgcccgtacgcctttgggcaactacttaatcgatgtttttaacgaagattggcacaatatcactgaacttaatcgtcaactttgtttacaaaatggcgtagttagttcttcactatttgaaaacttaactacttcattaattactgaaaaagacggagaaattattgaacttaagagaggtaataatcatgaaaacatttaattggggaattattggtactggctggattgcacatgatatggctgatgctttgaacaaagtcaacggcgaaatttatgttgccgcaaatccaaatgaagaagcactccgtgcctttgtccaagaaaaacatgtacagcatgctttcactaatcctgatgaaatgattaaggatcctagcattgatatcatctatattgctaccccacacactttccactacgactacatcaaaaaggccctcaatgctggcaagcacgtcttttgcgaaaaggcaattaccgtcaatgcacagcaatttgatgaagtggctcaattagctaaagagaaacacctaatcttaatggaaggttttactctttatcacatgccaatctaccaaaagatgcaagatatgattaagaccggaaaatttggcgaaattaaaatgatccaaattaattttggctcactcaaggactatgatccgcagaatcgcttctttaataaggagctcgctggtggtgcattgctggatatcggcggctacgcaactgcttttgccattagtttcatggatgaatatcctgaaagtatcaataccacggtaaaattctttgaaactggtgttgacgaagaaagcggcattattttaaaaaattcgaaaggccaaatggcagtgatgtcattatcgatgcgggccaagcagcctaagcgcggactggtttcgggcaccaaaggttatttcgaaatcaatcaatatcctcgcggcactgaagctgatattacttacacccagagtgctcatgaggaaagctatgataaggttactgccggggatgctgatcaggcgcttgaatatgaagtcactgattttcaaaagtatattgaacaaggccatgacgaaggcgaattggaaaaatcgcggatgatcgctcacattttaaccagcattagaactgcctggggcatgacttatccatttgataacgaggaataattagttggatttcaaaagggatcgatacataacatcggtcccttttatttgcacttattgcttattttctgcgacatatttttctagtcgtttcaagccttctttgatctgatccatcgacgttgcgtaagacaaacgaatatatcctgctccacctttagcaaaaaatgagcccgcaattacagcaacatgcctcttttcagccaaatcataaataaacttggtatcatcttgttccaagcctgctggaattttggcaaaaatgtagaaggcacctttaggcttaacgcattcaaagcctaacttggttaatccttcataaagcacatcacgccgcttttggaattctttcttcattggttccgcatcgttcattccattgcctagtgcttcttcagctgcatcctgcattggcgttggttccgtcgttgtgattgcttggtgaatcttagccagttgatccaaaatcggcttaggcgcagctaccacaccgattctatagccagtcattgcccaagcttttgacacgccattcattaaaacaacttgatcatgtaaagtcttttccatcgaagcatgtggctgatcataattgagctcactataaatttcatcacaaagaacaaaaaccggcttatctcgaacaacatctgctaaggcatcaagttcatcttgtgaatacatcacacctgttggattggtaggataattcatgacaagcgccttaacgcgatcaccatacttgtccaatgctgcttgcaatttatccggcgttaatttgaagtcatcgtcagaagtgtcgatttgttcaaccgttgcacccatggatagggcatccccaatataaagcggaaaaattggtgttggcaccaaaacaacgtcgcctggattaagcgccgcagtcaaaaagtcgtagatcgactccgttaccccattggtgatcaaaatttcgcttgggtcgtatttttgtccatatttttcagctaaaaaatcggctgccgccttgcgcaaacctggagtcccgttagatggcgcatagtgtgaatggttattagcaatgctggcttcagccgcttttttaatatgctctggcgtgttaaagtcaggctcaccaatcgtgaatttgacgatgtccgaaatcttgttggtgtaagctgcaaaggccaaaatctgccctggcttttgttcaaccaagccttttttcatatgttttgttaagtcgaccatagtttttcctccttatatcgaactaaatcaattcaaatataggagtctttttaatctttgtcaaaggaaatattaattttgatatctaaagtgcacattaaatccaataattaacaaagcataaatactataaatagccgtaacagtcggatacattgcctgatactttatcagcaaaagaataattaaaactatcgccaaaacaatcgttaatattctaaaacgttgaaaatatgacaaaatcggtaaagccactgtcaaaactatatcagttattaagatagtaaaatccaccggatatgatttgatataaaaaaactgaaatattggcaatgcttctaacagtaagaagatataactaataatcccacatattaaaagcaactgattaagtatctttttatagtctttcattaaatcaagaacttctcttttttcatgtaccagtgcttaaccagagtggtcaatgcaatgtacaaggtcaaaagtacaagaactacgagaacataatattctgggatcggaccgaatttcattaccttagccaagcttggaatgtaaggcattgcagtaccgatcaatcctgcaccgatcgtagcgagcattactacgcctgaagagtgctgttgtaagaagggaattgctggatcacgcaatgcttggataaccatttcctgtgtccagagtgattcgatgaaccagccactccagaagatggccataaagacagccttttgccctggagtagcagccacataacttgtgcccacagtacttggacaaatccagaagtaaagcaaggcaaacgtaatgatatcaaagattgaagatgtcggaccaaagaagaacatgaacttaggcaacttctttgtctcccacttacgtggtacttccaagtatttttcaccaactctatcaaatggaagtgacaaacaagatgtcccgtagatcaagtctagaatcaacaattgcattggcagcattggcaagaatggcaagaatgatgatgccactaagattgacaaaatattaccaaagttagatgacaaggtaatcttgatatatttcatcgtgtttgcaaagatctgacgcccaattcttacaccatgttccaaagtacgtaaactcttgtgcagcaagataatgtccgcactcttttttgcaatatcaacagccgtatcaactgagattgctacatcggccttcttcatggctggcgtatcgttgataccgtctcccatgtaagcaaccgtgtgaccattttccttcaaaatctgaataattctagcctttgactctggtgaaagctttacaaagaggctacattcttcaaccatctttttaacttcatcgtcgctcttaccagcaaaatctttttcactataaatgtacttggtgttcaagcctactcttgaagcaacactcttagttacagcagcgttatcaccagtcaaaatcttaacggtaatatcgtcttgctttaacttcttaagcacgtccttaacatcatccttaggtggatcaaggaaggccaagaagccagttaagatcaaatctttttcatcgctaacattgaattcaccggcttgagcaggattgttcttgtaagctaacaaaacaactctcaaaccatctttgttcaaatcttcaatgtgctttaaaactttttctttgtaatcatcagttaaatcgttgatgtgactgccaacttgcacacgattgcagcaagcaagcatttcttcggcagcacccttagttaccaggatacgaccatcgccgtggcgcttgaccacgacactcatgcgacggcgcttgaagtcgaatggaatttcatcaaccttagtgtagtcgtgtttaatttcattaacatctagctcatcgctagcggcatcgatgatggcttggtccatcaaatcgtgcatccccgtttggaagtacgagttcaagtaagccaagcgcaaaacctgtggattttccttcatatccaagttgtagtgccgttccaatacaaccttgttttgggtcaaagtaccggttttatcagtacaaagcacgtcggcggcaccgaagttttggatggagttcatctttttaacgatggtgccgtgcttcgacatttctagcgaacccttaaccaaattactagtaacaataactggcaacatttctggagttaaaccaacggcagtagcgatggcaaacaacaaggcgttgagccagttacctttagttaaaccgttgatgaccaaaactaaaggtgcaatgatcgcggtcattgttaacaataatttagaaatgttcttgataccaacatcgaaattagtttccttaacgtcgttgtttgaaatatccttagccaaacgaccaaagacagtttgttcaccggtggctaaaacaacgccaacacctgaacctgacacaatagttgttccttgatagattacatcaggatagtccaaatattgatccatgtctttttgatcgggcctcttagtcgcaatcttttccacaggcgttgattcaccgttcaaagaacttgatgaacagaacaagtctttagttttgagcaatctaatatctgctggcaccatgtccccagcgtggatattaataatatcgccgacaactacttgcttggtagaaatttcttcatccttttgattgcgacgaatattggtagttacagacaccatatttaagagggcttcaactgcgtcattagttttcacattctggataaaggatgttaatccagaaataatgatcatcgcaatcataatgatcacagtactcaggtccttttgatctgccggcacgaagacgtagtcggtaaacagcgacaccgtcgctagcagcaacaggaccattgtaaaaggagtgaagaatgattcaatgaagaaatgcaatttcgtgttgtgcttcttggtagcaacttcgttaagaccattcttctccaaacgctctttagcttccgccgaagacagaccgtctagcgaactatgtagcgtctttaacgcttcttcgggagtttgcctagcgatctgcttaacaaactctgtatcggctgtcttcttattaatcagcaacttgttttttgccatgttaatcacactttctgattaaacacgcaaacaaactaaaaaggagccaataccaattagtattaactccttatctaagcgatgtttcctcgtcgttcagttttgacactacgtgacgtaagcacaggctagctatctggatctcgccttatctcgacaagaactattttactcgttggcatctctggatgtttccgggcgatagcttgtgttcacgtaggagcctcacctaacagtttatttgctttttcaattttcatttttattatatgcatattatttgacaatgcaattatctttactaaatcgttagaaattgtaaaagaatttaagaatgataaaaaacacgtgtttgcaatgaacacgtgtttttttataatttaattttgatatactattctatagacatggatatgttgcaactatttgtgtttagtagttttagcataactaaccacccctcacacattttgaaattacggcggtgagagttatgcataaacggatagtttggaggtttagtgctccgtggtagcttgggctattgcaatcagcatcgttctaggtgctttaggcaatttagctatcaatttggctatagcctatgcgataacaaaaaaagctaatcgcaaggattagctaaaccaacagttatctgaaactacgatcgaagtcaacggattgcggccgtgggcttcttttcatatacagattataacatgaattatccgaaacgaataaaaaagatcaggctcactgcctgaccttgctattgggttagctggattcgaaccagcgcatgatggtaccaaaaaccattgccttaccacttggctataacccaatcttcaaaccttttacttgattggttctatttgaatgacctctcgatcacccaacagatattagtataggggaatgaagaaaaaatatcaaggaaaaattcaaaaaaattttaattttttcacatttgctcgaaggatactgaatctttcttttatgaattataaaattaatttgtttttttacgattataacttttgtgacttcttaaccttattcattaattcaaagtcgttggtaaaaattccagctacaccaagtttaaagtacctttttgctatgcttactttatctactgtccaaattctttgcgtaactttgctaggtaaataccaatgcggatggatcgctgcaaaatgattcttagccgcaaactgttcaggaaacggcaccggccatttgtttaaaaagcaatattgttggtggggatcaattcgctggcaattttttaaggtttgataattgaaggaagagaaaataatgggatgcacaaaatgatattcttgtgctaacgccaaaacgatggcttcaatcccctcatcatgaatcttgttagtcttaaattccaagttaacatacaaatcctgtccctgaagaatttcaaataattcacttaacatcggtaccggttcaccgttagctaaacgaaatcgcctgatttcacttaaggtatagtccttaatataacctgtcccattagtagttctatctaacgtttcatcatgcattactaccggcactttatctttagttaagtgcacatcaaattcgacaccttcagcgccatgcgttgctgcatatttaaatccttgcaaagaattttccgcaaatttgaccggtaagccccggtgagcaaaaataattgtctgagtcattttttcacctacaaaaaaatgccgctctcgcggcatctgctctattttaatctaagacgattgcaccttgagttgccaaagtatcacgaactagattcttaacatctcttctaactaccataccatcggtgttctcaacgtattcaagatattgagctgacttaatatgtgcatcataagccttgtcatcaaagtaaacttcgacaaaataccattcgttttcgttcttcttattgactccagacatcataatttccatgcctggttcagcagccatgctagtcgtcatttctttcttaacttcatgcgcaaacttttctgcatcttctggtttaacttcaactttaactaagcgcattacaaaatgatctgcgttatcattcaaagcatcatgagcctttgtggtaataacttcgggctttaattcgattacttctttgtctgtggaaatcttgtcgatggtttctgcaaaatcatcagcatgtgctgctgcaatgtgcaaatcttctgccaagctattccggaacaattcgatttcgtaattgtcttcaccatgagcatcgtcatgtgcgcttccaattaacaaagttccttcttcagctggaattgagttgtgcatgttattttcaacttcacggatatattcaccgcgatcgttttccttgatatttaatttagtaattctaaaaattggtgtttcatccatttttcttgcctcgtactataatctttccacacctatcattataaactaatgcagaaaaataaaagcccctattcaccagttatttgatcaattttaaccgctttagctggccattcagtccgtacatattccaatgtactgccttcattgctagttaactgcacaaaagaacaattgggcagacctaaaaattcacgatggttagttttttcattaatgtattgcgacaaactatcgccatgaccaacaactaaaatattatcgccatcttgtgcatcccgcatgatcaagttaatcccgcgctccattcgctcaactacctcatgattatcttccacgcgaaatttgcccaaacgatgcagcggccaaagtagcacattgcgtgcctcaaaagcgccatagcttttctcttttaattcctttaatcgaacatactccatctcaggcccagcaataatctctaaagtatcacttgccctttcttggggtgagcaatatgctctagcaaaattaattccctgatcttgaaaataatcccgcacggcttccgcctgcttaatgcctaatggtgttagcgctgaatcacagcttccctgcatgcggtgtcctttattaaaccaagtttgaccatgtctgactaaatataaattaattgccatttcgtcttactttaaaccctctgctggccacacgtatgaatcaaaatggatctttttaccatcaactgttagcttcacgattgaagcattgccaaaaccgccaaagttcttattctcggtagcatcgcgcacaaacttagctaaaatatcaccatgtcctacaactaaagcagtttgaccatcctctaagccgcttaaaatctcgactaccgcacggtgcattctagcaacaacgtcttcgtctttttccatagttgggtctacgttaggattattataattccaaggcaataagaactcatcacgaccttcaaaaatgccataacatttttctcgcaggtcttttaaacgcgtataaggcatttgatgatcagtaataatttccaaagtatcgcaagcacgctcttgggttgatgaaaaagctttgtcaaaatgaataccctgctttttaaaataatcacgggccatttcaacctggcggatgcctctttcattcaatggtgaatcacaacgtccctgaactttatggtaatagttaaaataagtttgtccatggcggactaaatataaagtttttgtcatattttcctcgctaaatcgttttttcctttatcttatcaaaaaagcacgcgtcgtgcgtgctttcatattttttcgttaaattttgaagttcttgttgtattcactcgaatttacaacaaaacttggcacactaatgaagtgcattgagtaaatattgccagtcttggaaatgctaaagccataataattgtagtccccatcatgacgtgagccctgtgtattaaataaatcaccggcatgttcccattcgcggtaaaggctcttatcattacgctgattttccccagctcctgcaaagccaaagatcatttgcttcaagccaaagtaaatatttcgcttcatttcagccatagacataatcttcttattagtagaaaaaccagccatatcttcgacataattatcgtttaattctaagccatgtttcttgcaagcccgtacaattccggcaacatagtgatcgccatctttgatactcttgccattttgctcgtattcttgcgcaattgaattagctaaggactctactccagaactataaacccacggcttcaaacctaattgactacgagcactattaattaggcacaaagagaattctgccagttctttttgctcactagcagaaagatcggcaagattgatcattttttgatcggctttgctttcacctgagctaacacgtgaaaagtcgttttgctccattcctttcatgcaagcctgaataaaactagcacttggcttccccttatatgcttgcaataaactagctttcgtatagccactcggcatcttcattgtagctgttacataattctgcgttgcagcagtctttttaacgagtttggcatttttagctaataaccattgagagttatttccaatcttataagccaaatattttttcttgcccagctttaaatactttttagcagaataagaatactctcttttagctacagcataatacttagacttcttgcccttatttgtataaagtctaactttcttagttcctttaacctgaacttttcccttaactgctgcttgaaccgtttgtggtgtcgtttcgtgtattacactagccgtccccatcaggcaaacactagtcaacaaagtcacaattaatttttgcttcatagctgttccactttctgtatgttttgattattaatatttgttatttaaattatatcgtatttatttaattacgcgtggtgctagttaaatcgttttagttaataaaaaagtccaatcttgttagactcgacttgtaaatagtaataatagaaaagagtctgatctgattgaactgccttaagcttaagcgttttagccaccatttacaagttagttttaaagatttagtgataatttgtcggcactggtatcgtttgtatgcaccggctgagtttactcatcggcgaaatattgatcaaattaaaactacggacagtctgattttggctttacttatctggcaagctaagacaggaattgaatcacaaagaagattctgtgaatgtttcaattgtttatcacactcacgttttaatcggcgttcacgtcagctattgcaattgatttatcagatacggcaagaaatgaataaaaaggttgacctgaatggacagttcttgatcattgacagctttccggtacctgtttgccaaccaattcgcaactatcgtgctaaaatttttcgcggttatgccaacattggttataaggccaccaagaaaatttacttctatggtttcaaagttcatgccattgttagcgatgacggttacattcttgattatgtcgtaacaaaggcatcagttcatgatgccagggagacagttgaactgatagaaaatacccatccatctaattactatcttcttggcgacgaaggctatttaggcaaagaactgcatcaacagctaaaacaaatgggttacgaactttggacaccatatcgtaaaaatatgacaggagctaaaaagcacaatgatcatcaattgatggctattcgcagaacaattgaaagcgacttttcgcttctgacctattacaatgccgagaacaatcgagcacgtagtctgataggctttcaaagccggttggaaattgcaattttagcttataatttggcttattgtctagaacgatttaactagcaccacgcgtatttaattaaaaaaatcaaaaagagacacactatcattttgacagcatgcctcctttaagttagtttgattttatttagttttgaaaagaggtttatttttagtaccagccgtttgcttgccagaatgccttagcagcagtccatgagccataacgacctttgacatagttatcagctactcgctcttggttagctgctgaatagtcaccattcaagtatgaagctgaaagttggtatttaccaacgtattgaccatttgaagcaccgtatgagccaccagattctctaccggcaatccattccttagcactagcttctgaaccacttacagttgaagtagtagtttgagtgttggtgttatttgctgcagtagtagttgctgcagaattagtattttcagtttgagtttggtgttgtactggagcttgggttacagcagcttgagtgtggtagccgcgagttacatacttagcacgaacccattggttcttgcctaagtcataccacttgtgacctttggcatcgtaagcagtcttaattactttccatgaggtgttgcttgccaaagtttggccagtagcctctggattcttgtagctgttgtaaacagtgattgcgttgtctgaaacgttcttaactgttacaacagctgtatcgttttctacaatagcagcttgagcagtattagtgttgttattagctgctactaaacctgtaactgataaagcagttactgcaattgacttaactaagatagatttaattttcaaaaaaattctctccttaaaattttaaaagtcataagtaacgaattttcaccttattcgtccgtcccattcaattgacacagcatatactaccttgcttaaattgcagaactataacaggaatatcacctgcagattaagaaactattgcaaagtatgtcaaaattgtaacaattgtaatatttatgtaaatttattcagatgatacaaaaccgcatcagatcgccatttaactcgatttttaatttttatttgctatgtgcaaaagcttgttcgcatttaatatattgaaacacttttgcaaaacgaaaaaagaaagagtttcctctttcttttttaattctcacaaattttttattaatttattccattattctgccttatcctcttctataagttgacgtttattaagtgccgcaataaatggcaggtaaatcaaaatgtctaagataatattgattacttgcaaaattgagcccgcaatactgcctgttgccaaaaaaactgaaataattggcggcattgtccaaggaattacagtcccattacataatagaactaagcctaggttcattgcacaataagtggtaatcgcatttaacattggcgcaatcataaatggaataattaacaacaagttcattacaactggcagaccaaacatagttggttcattaatattgaacaagccaggtacgatggtcagtggtgctaaaactttattttgtttacttgcgcgcttgcgccatactaaatatccaatgcaaagcactaacccaatagtggcacctccatcacccatgtaaacaaagttatcgataaatggttgcgtaacgatatgaccaccatgagctaaatctaagttacctgcttgattcaatacacggttagcatcggtttgcatcaaccagattggttgcatagcagtattaactacgttaccaacatgaataccaacgaactagaacaagctcaataaaataattgaaactaatgtaccaattaaggtatcgcctaatgcacctagtggcttagccaaaatattcatgattacatcgtgaatattgccccatccaatccaagcaaaaagccagtaaacacagccagcaatagcaattacagcggcacctggaattaaagctgaaaagctcttagctacagcaggtggcacagtagctggcattttaatttggatattatgattaataaaccattggaaaatccatgcacttaggagaccaaagataatagctacaaataatcctctactacctaagtaagtgtaagggaagccttcaactggaactttatctccactcataatacttggcgtcaaaatgaagaatacagctgcagaaacaattccggcagaaacaccatctgtcttatattgattagcataactccaagcaattccaaaagctgcaattaagaccatgatcccaaaggagccattagtaatcttggctaaaatctgtgccaggcttataccatgaacagcagtttttgatagccaatcagaccaaccggcaactggaaatgaattaatgatcctacaataattaacggtatagccatggcgataccgtcacgaacagcaattaaaggtttaaaactgcctattttagcggctacaggcataatgtgtttgttaacaaacgcattcaaacctccgctcgatttactattagccataataattccctcttcaatctaaaaatgatctcgtgtttctttggtatatacctttcgcaatataacaatatcctgaaagcgattttattaccactattttaaaagataattttttgcttatatttttaaccaaagtttgattaacaaaatattgcagttatggctgtaagtgctatagtttacatgtaatcataaaaaaagcgaggaaataaaattatggctaaatacgaagtaaagttaagcgaagaagatttacaaatgatcaaagattgtcattcaaagaacccttcaatcatgaaggctatgaacgaagccaagaaagtcgaagattaagcaaattttgatctctaaatcgaaaaaaggcgtccgcaagggatgccttttttattggttttcaaatcttgtaccgtggggatgcttccagttataaacacggactattttacccatgccatctagcactacaacatttccatcattatgtggataaatcaatggatcagaatgtgaaccaccgtcagtaaaaattcttgctggctcacctgggtattgcactgttctaactatacaatcatcaattgatagccgcctcatttgtcgaccatcatcatattttccttctaaagcagctgttggcgtatgaccagtcacaattgttttgcccgttttgttatgagccatcattttcaataaggaatcggaataccaatacttatctcgtgcccaaatacggtaaaaatcatagtcaaatttcaagccatactctatctcagagtaagtttccggatcattatactgttcatctggccgcacacccgcatgaacaaaaatcaagtgtggcgtttcatacataataggacagccttttagaaagcgataatactcactatcacgcaactcatcaggcaaaactgtactgccaaacagactaactaggctcttgccaccaccgttataaacccaaatgccatcttgatgttcctgcttctccgcaaaattgagtaacatttgctcatgattacccagtagtacgattgctccttcgcttttttgctcaattaaataatccaatacttccttcacatgctcgcggccatcaacatagtcaccgcccgcaactaattgtgcttctggaaaatctgctgttgcctgcttgattaagtctaaggtttctaagttgccatgaatatcagaaatgaagatatagttctccttcactcgatcatccaacagcgttcgattgataatttttttcatttcatactaccccatgtgctaaattaaactaacatttttttcttaattatagcagatgtacactggttctttttctatgcaatcctaaaattaacctccggcaaaaaaaaggctacaatagatatgaaaagaagtgattgcaatgtttaatgaagaaaatgcaattgatgccaaggacttacacgttgattctttcaaatatcaatcaactgaagacatgccatctgatgcttattctagctgggaagaaaaacacccaaacgccagggtattcaagcttgaatttcgcaacatcggcgaaagcaatgaatggcaggaaatgatcattatctacactgaataaataaaaagtggaagaactccaagcctagtgtgtttcttccacctttttacttattttgattttctttttccttcaatttgtgcagaatccgttcattttctttagtacgtttttcaactgctgcatcgatgatcgaatcaaaccaatgattatcagaatcatcgcttgtttgatccttcttttgaggaccttcattttttacacgtttgtcagtttcttcattaataatggaatccagccaatcaaaattatctggatcatggctcttatcagtcatttatttttcctccatttttgatttaaattaatttatttactattctttttgactataattgagttaacaagatgaaacaagaaagaagtgttcgaaatgaaaattacattcactgacaaggcgcttgactacttaaaaagacgcgaaatcttgaataaaattctaattttaatcgccgacgatggtggtggtaaatattctatcaaaggcggcggttgtgcaattggcagtcacttttccattatttatgtagacaaagttgatcctgattatccaatcaagcttgaaaacgaccaaggaatcaatatttacacttctaaatacgacaccacaatgatgggaccaaatttagtggttgactacgccaatgcatccctcaacttaaagagtgacgaaggattgcttgatggcggcgttgatatcggcaatggcgccgagttaattaaagctcaaaagaatgtaaaaatgaccggcgttgaatggcgttgctagattaagatgatcagaaaagacagtagtttgaaatcaactactgtcttttttctatagaaattgaccactattaggatcgaatccagtacgatctgccgcggtaatctttctaattaccttacatggattccccgctgcaattacattatctgggatgtcattcacaactacactgcctgcaccaataattgaattacgtccaataattgtatctggagttacgctaacccctgcacctagccagacattgtcaccaatgccgatcgaatgtgcaacacaaccaccggcttttcgctcggctggatcaaataaatggttgctggtatacaagccaaccttaggaccaaacaaaacattgtttccaatataaacaggcgcgccatctaaaatcgtgcaatcatagttggcataaaagttatccccaacatgaatattttgtccaaattcacaacgaaaattagggttcacgaagggatgctcacctgttgaaccaaagagttctttgattaatatttcttttttagcgtgatcattctcattattaatattattggtcttcaaggtagcaaggtctctcaaggtgccaaggcgaggatccgcatcattataaggacgaccagtagccatgtaattaaattttgttctaagcgacatgattctttcctttcattagttcttctatttttattatagaaaagaaaaagcgctttcgcatgtttgacgcataatatttagcacactagccctaatcttattgcttattctataatggtaaaaaagaaaggattaaagccatgaaaaacttcaacaaatttaccgctaaatctgcttgccttttacagaatctactagtagtctcaattggtttactcgggattattctgatcatactcttattccgcgatctaattccactttgccaatcattattttcaactaagatcgaagaaagcaactccgagattatgtcagaaattatcgttttcttactcttctttgaatttactgcaatgattatttcagccttgcgtcatcacggtcacactagcatcaattttctattgggcttaggtgttactgcgctaattcgcagtctgattacttctcatagtaacatttggagtacgcttgccacttctgcttcaattttagtactagtaatcgcaatggttattttcaataaaaatctgcgtaatatgtaaaaaaactgtatcactctaggctaatgtcattggagtgatacagttttttgttttactaattaactttgcgccatgaactcattaagttgtttcttagaaaaaacattgccatatttgcatactacgtttcctttcattattgaacgtaattcacacaaccaaaaaagcatcatttattaacaatattgaaaataaataatgctttttagtaatactctgatgctgaatgccagagtcgaactggcgaccttctctttacgagggagatgctctaccaactgagctaattcagcaaactcacaacacatgaattataccaaatgtcgctaattggcgcaacgacctttttctaagctagcattcaaaaaagaacattatttccaatctaagcacaatccttgcttgtgcaattcttctggcaattgatcacgatcagtttcatgcagatcaagttttttacctgtaatctgcttagtgaatgaatcaatgcgacggttagaatcacgtaagtcataatatgtcgtaactatatcatcatagtctttaaggtctttcacatcaaagtctttcttataactaccttcaaaacaagtgaacttaagtggtaatcgtggttttaattgtggcttttgatctggcataccgacttgcatccccaacactggaaaagtcaactcaggcaaatcaagcgtcttaagcaaatccaacggatgatcgttaaccgtaccaagtggcacatagcctaagcccatactttctaccgcattagcgacattttgaaaagcaagcagcgtatcttctattgcttggaaaaagatatcagttgtgtgaacacggccgtcgtctttgtcaagttgctttctaatttgttggttacggtacaagtcaacgataaaaataaacaaatcgccttctgcaccaacatatttttggttacataacttttgaattttcttcaggatcggtaacgtgcagtaagctagcattttgcataaacatgctggttggagtttgaccaaagacagaatacaaagtttccagttgttctttagtcaaagtttgatccttaaattttctaatagaacggtgatttaattgcgtgtcgattgtttcgttatgtatcattttcatccttcttactaataatcagtaagttcattataacaaataatatggctacttttcttcaaattcaattccgtaatctgcttgctctccgtgctcagctaaatcaagccccattaattcatcttcttttgatactctaattggaataatccttttaagtaataaaacgattatcgtcgtcatgatccctacaaatatgatagtaaataaagttcctaaaatctgagctgtaatcaaatgcaacccgccaccataaagcaagccattttcaatttgcgggttaacaatcttagtcgcaaataatcctgtcaaaatcgaacctacaattcctgaaacgccgtgacagccaaatacatcaagtggatcatctagcttcaattttggcttaatcacatgaatgaagccgtaactggctagtgtacaaataaaaccaatggcaaaggctcctgccacagtaacatagccagctgctggcgtaataccgactaatccacacaaggcacccgtacagaggccaatcatagtagtcttttctttaataaacatatccaaaaacatccaaaccacaaatgacgtaccagttgcaacagttgtagttaaaaacgcttgtgtagctacatcgcttacagttaaggcagaaccaacgttgaagccataccaaccgatccataatatactggttcccattaaaacccatggtaagttataatgcttaacctcaccatttggatcaaaatcaattcttggaccaacaaaaattgataaaaacaaggcggtaataccggcggtaatatgaactacagtcccacctgcaaaatcaagcatccccgttttggctagaattccatctggtgtccaaaccatatgaaccattgggtaataaatcaagatcgaccaaattgcgacaaatgcaagtaaaaatttaaatttcattcttccgaccaccgcaccaacaaacaacgccggcgtaataatcgagaacatcatctgaaacattaaataggtcaaaattgtgatgcctgaatccttggaataaagcgtctttaaatcaaagccgtttaaaaagacacttttactcaaaccaaatattccaccaacatccttacccaaagccaagttataaccaaaagcaataaacaaaacgattgcgacacctgtaatcatgaatactgaaatcatcgtattcacagcattcttctttgaaaccatgccaccatagaaaaaagcaagtccaggtgtcataaagaaaactaaaacactagcgacaaaaacaaatagagtgttcgtttgattaatcatctttttttctcctcaaagtaaaatagttagtcctaatattttaaattggtatatacactatttcattgatgttgcagcatatatgcttaattaaaaaatattggtttgataaaatttaattctcattatacactcatttttcttcttgtcattaattttctataaaaaataaaggtgcatagacgtatggcttctatgcacctttgcatatatttgcttttaattatttgttttcgttttcaagattgttgattgcagtttcaaccaatgcatatgcttgttgagcttggttcttagcttgaacatattcgttcaagttgtcatcaccattagtaagcacacgtgcaaatgaaatttgttcagccatcaagaagttgaacaatgaatcccacttcttgtcttcaaacttgatttccttagcagaaattctaggcatcatttcacgtgtggtattaaatgccttttccaaaatttgttcatctgcatcggttaattcacgcacattgtatgcttggtggatttggtgaacctttaaaagttcttttaataaagttcttgcttgtgcatcttttgaaactgattggttaatttttaaagccatttttacctactcttttcttttttattaacaattataccaaattgtcttcgaccatttgcttaacgcagcgtttcatttctttaatatcaagaatactgtaggcaaattcttttctaagtagttcctttggcaaatattgatcgtacttgtcgattcctggcacttcgtttggataaaccagatcaagcggatcaaagtctttatcagcttcttcgcctaaaatgcgccagaagtcatgctcatcagcatccatggcaaaatacatgaagtatggtctagatgaattaaagccacggatatttaactttttaccgcacttaattcgaattaatcgctctagtgccaaaaatgcataagtcccagtccatggaaaaagacaccacatattaccgcccagcttgatcaaattattctttggcagaccagctaaagcggcggtgtctctagcttgcgtcaagcgagctttaccattttgcatcaaatatggatacatcatcttttctgcaagtacctttttcattctctgtaaaattttaggttgaatatctccaggtacatctccaaagtaggcaggaattctaccctttacttcatggcaatatacttgatgacgcttgatatccacgtcttcgacaacccatacacgtccagcaatcgcaatcttgtctcctacaggaggtggcttaacgatcgtacctaattcttcgctgccagcgtgaacactgaattcctcgttttcttggaaaactgcgtaaaatttaaagttattcacaactcgttcaccagcaagaccaacgatcagaccaccatcttcagtccactcaatgtgacctgttttaagcaagtgtttgagcaaaacgcgataatcgtcttggctcacgttgtggaaatatgacaaagttaacacccgtgaagcaagttcagctggcgtcatttcaccgcttgaagccagcgtactcatcgtctgatgatagagcaaactatatggcaaacggttaggttcaggtggctccacccatttttcttccgcatacagttgtaccaaggcaatcccttgaagtagcggccacggaatcagttctggcaacatcgctcttgattcagggtgttcttcgcgcatgacaaagtgcatctctgatggattaccgcggcgccctgtccggcccattctttgtaaaaagccagacacagtaaatggcgcgtcaatctgaaaagcagattctagtttgccaatatcaattccaagttccagcgtagctgttgcacaagtcgtcatgtagacatcgtcatctttcattgcggcttctgcagtttcacgcaaggcttgagacaaattaccatggtgaataatgaagcggtctggctcatgattataggcacaatatgctctgagctcctgacaaacagcttcacattcttcacgactattggtaaaaacaagacactttttaccacgagtatgctcaaaaatatagccaattcctgggtcagctaattctggtgccttatcagttttcggttcgatttggctcggatcaaagtccctggaacttgcttgtggatttgttttataaaaatgttccatagataaatgccaaatctgtggttcattttgtacccttggtgtaacagtttttctgtttgaaccagcacccaaaaacttgctggcatcttctaaattaccaatagtagccgaaaggcctattctccgtggatttacattagctagttttgataaacgctcaattaaacaaaatgtttgtccaccacgatcacttctaagaaatgaatgaagttcatcaaccacaatatattttagaccaccaaaaagatgcggaatatccatgtgcttattgatcataaagctttcaagcgattccggcgtaatctgcaaaatacctgaaggatgcttgagtaacttgcgcttttgtgtttgagctacatccccatgccagcgccaaactggaatatccacatctgtgcataagtctatcagacgatcgtattggtcgttgatcaaagccttaagtggcgcaatatacagaacttttactgaatcttctggctcattataaatttccgacaagatcgggaaaaaggctgcttcagttttgcctgacgcagtcgaagccgacaatagcacattatgatcggtgttaaaaatttcttcggccgccgcaacctgaattggtcttaaacttttccagccatgttcatagatataatcttgaataaatggcgcataatgtgaaaaaacgtccatagtccatttccttaaatcttaaattcggtataatccttttccgcattatccgaaacagcctctgacttggtatagctgaattgatccgagttaagcagatcagtgatctttctatcaggattctgccaaacaatgtcgagcagctcaataaagtcacgaataatttcacgtggcgtgatattggtatccgctccaacacgggcatattcaatcttaataaattgagccaaatcatcatcagtaatcgtgcgctcataaccgtacaaattggcatgcatgtcagctagtttttcagtcaaaaccaacatttcttcagcggttaatggttcaagcttaattactggcgcatacatatcacgtgctccttcttgagcgaatttgcctgaagcaagtcggctgcgtaaagcttcgtatgaataaactccgcgacgacggtctttaactgcttgtggcgtaccacacataataatgcctaagtaccttgctttgccctgcaaggtatcgttgtacatggtcaaaatcttttcatagttgtactggcggctaattgcattcggaattttatagatattaaccaattcatcaatcataatcattaaaccagcatagcccgcttgtctaaagaaagtcgcaaataactttaaatattcataccaatcactatcactaataatgatatcaacgcctaattcctttttagcctcagtcttatggctatattctcctctgaaccacttgactactttagccttagtctcatcatcaccactcatataagcgtgatagtacatgttcagcaatttagcaaaatcaaaaccatgaactaattcgtttaatgaagaaatgacgccatagattttttggtcaactgcttgctcaaatttaggatcatcattatttaagcctgtttcttgcgaaacttgcatctgcactgaattaatccagcgatctagaatcaaagtcaaggcaccaccttcaggcctagtcttagttgataagttctgaattaattcacggtatgttgctaaaccctgtccttttgatccttgcagccgacgttcaggtgataaatcaccatctacaacaacaaaatttttatccatcacatagttacggatcgtttgaagtaaaaaactttttcctgagccataacgacccacgataaaacgaaagcttgctccgccttcttgaataacatccacatcgtgtaatagggcctcaatctcggcctttctccccacggtaatataaggtaaccctattcttggcactaccccaccctttaatgaattaaggacagtttgcgcaattctttttggtactcttcttttttgtggcatgatttcatcccttcaaaaacatatcttttaagtcatctacataatcggtaattacttgtggttggtcctgttcattattttctaaaaccacatcaccgaattcatcaaataatttttcattaatattatccatcaaaattgatgccattaagtggtgctgcttcaaataggtctgccaaggctgctgcatcagcaatgcagttaagaaaaacatttcattttcatctaagccatattcattatcaactttgacagtttcatctgcttgtttttctacttcttcttgcgcttctgcctgctctagctgcttttcctcatccgttaacaaactatcacgcgtcttcgaagcattggcccgaatttgatccaaatcggagaaatcaatcttaatctgatcaatctgcgcctttttttcttgaatgtgatattcagcaatccccgcgtcaattgccttaagtacagcttgatcaataaatcgcggcttaatcgaccgacctagtttaaattctgttcgcgccactctatctaattcatggagaaaattatttaaattaacccgctgacggctgatttgttgatcacaatgaatttgccattttccttggtaaaaatgatactttcttactgcatcaatctgatggtcagctacttgttgttttcgcagataaaaaacactgcctacaaagattggcttttcaattatatcaggcttgcccacaaacgcactgtaatacgcaatgccgtattttttagcatccagcagctccagccacacgtaacgcaacagttgaacaaataacttttcattcttattaataactttagatgaattccaataagtcgttttctttgcaaagactgctgctaactcttgcgcagtaaatttttctggatggtgtaaaacctcataatcatgatcacgcttaatctcagatgcaaagcgctgcttaataatcttttcgtctaaatcataataaagaacataatctttgagccagtcttgtaaatatacatcaatactaatgtcaaattgtcgcacatatttttcttcaaattctaacagcttttcatatccatcttgtgcgtcatcaacaccaatattgttcagtaattcataaatataaacaaaggcataggatgtactcgttttttcaaaaacatgctggcgaatcttgctgcgccaagtaaagtaacttctaagctgcccagtattcatatcatgataagttggataaaaacgcttaaaggcaaaaaattcaggataatcatcatcatagtcggccatcatcctagcctgttgataaaaattcttagctcggccacgactgggcaaaatactgtagtcataaacttctagcatctttctaattctatctggaaccagactattgttatgcttcttgcgaagattttcacttggtttaattgcttgggcttgatagcggtcatctactttatctggtgcaatataaaaatattgattctgggcgatatttacttcatcaccattcatcgccagtttaaaagcaaaatcaagtgcttttttgagtgaatcttcactaactttttctaatattgccccaacccaatctgccgccttgatcttcattggatcagtgaagccaggcaaatctcttattagtgcagccattgcaccacatttcaggtccaatatactctgaccttgcccacgtgataatatcgcaaaataaccactatcaactggtgacattaaaacgtaaacgctagtggaacctggtacagcaggcttaaatttcaaaccatatttggcatagacatatttgaagagttgatttgaatccattttgtctcctttttttcgcacgtacgttcattatatcatcgatttattttttaccaaagtcacgcatgtcagctcctcatgtacatttttaagtttcataaattttatatttttatatttgtgtggttattaacaaacaattatgttactatagtttatgtaagttattgaaagcgtttttataaaagcttcctagagaggacaaaaacttaatatgagtacaaaagaacgttattctcaagatgaattaagaaaagataatccaatgtttagccgcactcgtgccactattgaaagtgcattttacggcaacaatgtccacgaagtaaccagtgttgcagaagcttataacttagctaagaagcaatcaggcgttattgttactgacttgccaatcttacacactaaggaattaggtttgccacatggcgcaacccaattggtttacaaccacggcaagattttaggtagaactgctagcgcccgtcactttgttgacaatcctaatgaagatgctgaagcattggacggcaacctacgtgaagatatttacaaggggcatgaacaaaagtacttaaaggctactgttttagtaggtcttgacccatcattcactgttaaggctcacattatgatgccagaagatcaagccttcaaccttctttcatacatcctcaacttccacttcttcgacgatgaagctgaaaaattatacgaaaagtcaaagttctacgatgaaccagacatttacttctacttcgatccaaatgttcaagacgaagattaccctaagggcttaggcgtgtttgacgctccacataactgtgccgctgtatttaaccttcgctacttcggtgaattgaagaagggtaccttaaccttagcttgggctatcgctcaccgtcacggctacactgcttgtcacggtggtgaaaagtcattccactttgacgataaagacgacaagacctttgcattctacggcttatcaggttcaggtaagtcaactttgactcacgaaatgtacgatggtaaatatgacatcactgttttacacgatgatgccttcattatttcacgtgaagacggttcttcagtagccttagagccttcatactttgacaagactcacgactacccagctggccaccacgagactaaatactacaccactattatgaactgtgatgtaactttagacaaagacggcaagaaagtcatcgtaactgaagacttacgtaacaacaacggtcgtgttatcaagacccgctacactagtcctcaccgtgtagactttgaaaagtcaccaattactgcattgttctggattatgaaggacggttcattacctccaatcatcaagatcgatgacccagtattggcaactactatgggttgtactttagcaaccaagcgtacttcagctgaaaacttacctaagggctttgacatgaatactttggttattgaaccattcgcagacccattcagagcttacccagtttcaggtgactacagagacttcaaggaattgttcactaagcgtggtgctagttgctacagcttgaacaccgacgcatttatgggtaaagacattcctaaggaagttactaagaagttaattgaagacttagctaacggcaatatcaaagacagtgacttcaagccatttggtaacttcaagggtgtatcatacttacctattgaaggctacgaagttcaccttgaagacccagaataccaaaagaccttgaaggatagaatgcaagatcgtttgaactggctcaacaagtacgatgaagaacacccagaaactccaattcaagatgaagctaagaagaccttggaagctatcatcaaggaattgagctaatattaaggaaatgaattagtgtctcattcaattaaaatttaatttcttaatgacgaaaagacgagagttgaaattcagctcccgtcttttttattgctcaatgtaattttgcttctgtagtttggcatctatcagtttataaacttgcactttattctcttgtgcaagttgtggattatagttatgtgctatttcaatgacaatagccggcaattggtagattatcttatgaatggcatcactatttttagggtctaaacttgaacaaatctcatcaagcaaatatatcttcttagaacgaattagacctctaactaaagcaagtcgttgtgcctgaccacctgataaattgttcgcgtcatctgaaattaatttatctaaaaaatcattgccaaactcatgaatcagtcccatcttttttgcttcatgaagcattagatcatcaggtatgttttgcagaagtgatagattctccctcactgtaccttggaataaccagattctttgcgagatcttgatgaaatcggcaggattaatttgatgaccagcaaaggtgatttcaccgttatacttcagattattagcaatacaattaattaatgtacttttcccaatgcctgaagccccagtaacaatgatcttgtcatgatcacgcaaagttaaatttataccatctaaaattttcttatcaccatatgaaaaagacaaatcttttattttcaaaatagcttgagagtcatgattatcttgtttaacactttcactttcttcaaaattatagctttttatttttctaattgcatcggtgctatgaatttgagtctgatacaaagcaattgttcttagatatcccacaaccctatcagctgacaaacttaaagttataatggccgctaccgttacgttaaaccagcctctctgcataaaaagcaagccaataaaaattggtagcaatagtgtaactaaagagattaaccatgcaatgaattgtacctggaattgacaattattcatcttacgatatttgtcttcctcattaaccaagattcgatcaaatcgtttaaagaaaagatgtctgacaccaaaattcagtatttctaagcgtccttcaaatatatccttcattgcctgaatcaactgtgagttagatttattccatttttcggttttctcattcatcctcttcttgccaatatagcttggaatcagggttagcgctgaaagaagcaaataaataattcccaaaatcagattagtttctacaacaactattgccgatgcaaccacattaaatacaaactgaactatgtcagttatcccaaagaaatatttttgttcaatttctttagcagtaccactaatcgaattgattacatctgctcctcttgcttgcttcatgtctgaattagcaaatttagaataaaaatattcttgctttaaagcaatatttaatagcatcacaattctattttgaaccaaataaaacaagagcatggctatgtagactatcagatatgcgccaaaggctaagccaataaatttataaacgtggtcaatgttactaaaattgatattagttaattgtccaaacagtacagcatttaataccccttcaaatgctgaaatggccgataaaaccagaaaaactatttgtaaatatattggaacatgttttactacccatttaaaatttatttgttgtgtgttcattgtttaatacccacatatttctcataatcaacaagccaatcttcatcatttttataagaatgattcatacactttttaaacccaattgctttaaatcatcttcatctttagtttctaacaattgtcgctcttctagagacaagtgatacttattcactaaggcatcaatattctccaaagaaatatttttaccatcagaaagatcctttcttcataccttcagacattactatacctcctattttctctcgttaagtaatgcataattttcaacttgcaatttactgtgtatgggattgatatcaatgcttcccataattccccaaatgcttataataataacagtaagtattctcttattttttaatttcaaagccaggaattcattatgtacggtcaaaaatttaaagcacttcgtcttcaacaacatatttcactagagcaagctgctaacagagttatctctccatcgactttatccagatgggagaataataagattgatattcgcttcaatttagttattaagcttttagacaatattcatataaacctaaaagagtttactaattactgcaaaattaatcatagtaatccatttgttgcgaaagtggctatgtactatgaagccaacgatgatcgtcatattttgcaattaatacaaagcaagaaaaaagaataccaaaattcacataatcaatttgatttacttctactagctatcgcatgtaattgttattacgatctaactgataacaatgttttcccagtgagctatcaaaagaaattattctacattttatctaacattgaatattggacagagatgtacatcaatgtttttggtaacactgtttttctctatgacagcaaggaactatatagtatttcaatcagaattcttaaaaatttaaattctaatacatttaatgattttcaagaatattattatgctttatcctctgtcatcaacgccctaaccgctctaattatcaaaaatcccaaattagcatcacagcttttaactaaaatagagaaagtttcaattcctaaaccaatctcttacttaaaaattagaactaatgtcctcaagtatcttttagattaccgtttaggcaaaacagatgaaaagcttatctcaattaagctagaaaatttaaagtggttaggattaacagatattgcaaaagacttaactttcttctttaaccgtataaaaaatgatcgttcacctctttcctaattcatttgcctattatattaccctcatttttatctaattgatttttctttgcaaatatgcaaaattatttttagcaagaataaaaaagcctattaaatctaggtgtttacaaaccctgatttaataggtcttttatgcgtcttttttattgctcaatgtaattttgcgccttagttaaaatatccatcttctcatgttcagttaaatacttttgtgcttctgccaaattgacccatttactagctaaaatttcttctttttgaatgttaacctcttgtcctgcaacatagctagcaacaaaataaactactgtcttagctttatcaacagtcaactgatattctgttttttctctaaaagtaaagtcaaaattcggctttaaaccaacttcttcaaaaacttctcttctagcagcttcctcagctgtctcattattttctaaatggccttttggaaagccccaattatgatttacgacgctctgcacgatcaaatatttcagctcgccgcttctacgttctctgtaaataactgcacctgcagaatgttccatcttcatttttgtcacccaacctttatattgcataattattaaatatttattaacgtatgtcaagcaattgtaatcaaaaaaatgaccagatctttgacgatctagtcactttattcgcagacgaaattattaagttctattggtagaatattttaagttacttcttcaagttcttttcgcagtattccttgaccttgtcatcatcggccttaagaatccattcaactgcagcctcagtcttcatggtgtctcgaccatttacttccatttcgtggtcccaaatagcgtcacgaataggcatttcattacccttagcccagtcaaaaacttgatccatatttctatcaattaatgcagtttcttcaatttcttttgcatctgccataattaaaagcttcctttctgataacgactttattgtagttctattagctacaactgttaacaaaaagggacttttttatttaaattctaatttttgccattaactgcttcatcagccttattcactacactaaccgcattaagtgaacgaggataaccaatgaatggtacgttttgttcaatgaccttcatcaagaattccttgtcattgcctaatttgatatttgcttgagcatgggccatcaattgaggttcacagccaccttgagctgcaatataacagaaggtaatcatttcacggtcattgtcatccaagccttttctagtgtagtaagcgccaaagcaattatcaactaaccacttattgattgttcccttcttggcaaaacccttcatttgtggaccaaacaagcgcatttgagtttcctcacccttttcaaggcgattgtctagtgtagtagttgcttgacccgcaagaggtaattcaacgccgcgcttagttaaaacatcattagtaatcttgaaaaatggggaaactctacccaaacctaaataatcaaccgcttgatataaacttccttagcttcaactgggttaacaccattgtctagtacgactggaagcattatttcatattcttccttgccttgcatccccaacaaataagctaaagttgacaacatcttagtccggtcgggcaaatcaacgtctttttgcacttcgtcaaaagcaaaatgattaattctttccaaagcttctggatcagtagccttcaataagttggcatgtactctttatgcatcttctttaattgacataataaattcctttctaaacgcttatctctactatttatttaagtacgattgagtctaaaagaaaaatatctattttttattctgcaatataacttattcttatcaaaaaaatatcctaaaggctttttgccttcaggatatttctattaggttatttaattagtttttcttgtctgcttcagcatcatggtatgacttaacgatttcatcaactaattctggatcatctttcaaatcagtagtttctacaatgacatccttcaagtcttcatctttaagcatttgcatcaacttaacgctttccttgtcgttaggttcatcaaagtgataaattctaccaacagtttccatcaatgcactgtagtccaaacctctgtccttcaattcacggattggacggataaatctttcattgtagcctaacttacggattggagttctaccaacacgagcaatatcatctgaaatatatgggttttggaatctgctcaaaatcttgttgtggtattcttccaaactttcttcggtgaattccttgttccacttgtggtaaagaagtgaacgggtttcactcaagacacgcttaacttgctttaaaacaaatggatccttaatagcatccccaatagtgtcatagccaaggctcttgccagtataagcaacagttgcgtgtcccgtgttaactgagaataactttctttcgatgtaaggttcaaggtctggtgcatagtcaacgccctttaacttgatatccttgttcttcatttggctttcgtcaataacccattccttgaagtcctcaactgagacaaacaatggatcgtcattatgttggataggaacaattctgtctacagctgcgttagggaagccaatgtacttgtctagttcaggcttaacgtcatcgtccaagtgcttataaacttcttcttttaagtgttctgaaccgccaatcatgttttcacaagcaatcacatcaagtggagtagtgttgcctgattgaattctagcagttaatcctttggcaattaatggagcaatgattgccaaaatctttggaccaatggcggtagttatcatatcggttgatttaattgcttcaactaccttgtctggatccttagcattgttaattccatcaacatttgaaacatgaattctcttcttaccaggtgcggctaattcaatgtcatattcaccacgcttgtttaattcatcaataatagtttcattaacatcaacgaagtcaatgccaaaaccattatctgctaaagtttcaccaataaatccacgaccaatattacctgcgccaaaatgtactgctctcatgtttaatctcctacgttctttaataaatcaataatttcttctggtgtttgtgcgtctgcaagctttgcaacgttggaaacatcactacagaaaatagcaatctgtgacaaaatatttaagtgttcattgttcaaaccagcaatcccaaagacaacggttaccaattgctcggtatcatccttagggtcactaaaatcaacgcccattggaatttggactaccgaaattccagtttttttaatgtgcttcttaccttcgtcagttccgtgagggatggcgatgaaattacccatataagtcgacacatcttcattacgggcaagcattgaatcaatatactctggttcgacacagccgccatcaactaataattgaccggccattctaattgcttgatcccgcgttggtacgtcttgattaagtttgatcatttttggatctaattgtaatgccatttagctcatccctttctaattcaacttttgaatagcttcgccaagctttttatctttaagtaaatcatcaacaactagggtttgaatatcactgtatctgacagccaagttcttattagcagctggagtaacaattactaagtgacttggatcatcagtcaattcgttgattcttactgccttaacaggagtagtcttaccagccttcttaattgcgtcattgaataaactagttgccatagtagcggtacctaagtgttgatcgtgacggatgaagtccacttctttaactttactgaagtcgattccttcaagtgaaccaaccttcttaactggtttttcagcctttggcttatcttctacttgagttaaagctttgaagctagctacgattgtgtcatatttcggactactcaagaagttgccaaccgccacgtgcattgcatgtggagtcttttgtaaagcgcggtcagctaattcttcttgcgtgatgatcaacaaaccatcttcatctttcaagtttctaacagcggtattggttactgaaaccttaatgccagccttcttgaatttatcacgcaaaagtgaagcacccatagcagatgaacccatacctgcgtcacaagcaaagataattttcttaacattggcatatgacttaactgattcatgtgcatcttcagcttccggcattgattgacctttagattgggccttcatggcttgcatttgggcttgttttgcttctaactcatcaccagtactcttgtcgtttttaagaataattgcggcaataatgaatgaaacaactgcggcgccaagaacaccaacaatattaccgaaataagcatcctttgcggaaacaagcaagatagctaaaattgaaccaggtgaagcagctgcttttaatccaccaccaagagtagtgaataagaaagtaccagtaacaccaccaccaatagcggctaaaatcaatgatggtttcattaatacatatgggaagtaaatttcatgaaccccaccaaagaattcaatgatggcagcaccaggagctgagctctttgacttacccttgccaaataaagtaaaggcaagcaagattccaagtcctggacctgggtttgattccattaagaacaaaactgacttaccaacttgtgcagcttgttggatacctaatggaactaagatcccgttaccaatagcgttgttcaagaacaaaactttggcaggttcaataatgatgttggctaatggtagtaagtgaactctaataattgcatttactcctgcactagcccattgactgccaacttccataatcggtccaatgataaagaaggcgaaaatcgcagcgatcatgcctagaataccaagtgaaaagttattgtagatcatttcaaaaccagatttaatcttgtcctggaatacttgatctagtttcttcaataaccatgcactaagcggacccataatcatggcacctaagaacattggttgatcagtaccaacaattacacctaatgtaccgattgcaccagcaatggcaccacgttcttcataaaccatgcgaccacctgtataaccaattaacagtggcaacaggtaatgaagtattggttgaactaagttattaatttctttgttagggaaccaaccgtgtggatacataaagaatgcagcggtaagtccccaagcgataatggcaccgatattcggcatgatcataccggataaagctgtaccaaatttttgaaccttcactttaacagaagatttactttttgcttgagccattttcttcttcctctctcatcaacttacatttttattctaagtcaatcagtaagcgcttacaatgaaatgaaaatagaactctggcacacttttgtgccagagtctgagtttacctattctattaagcttttgaactattggttacctagtaaccgatctttgaggtcttgtaaaaaaagtgccgcaattgcttctttaatttctttttgactgccatttgtaaataaatctaagttttgactagacatgataatcatgctggaaatagtactcattacccgctgttcgggtgcagtaagattgtctggtgccagcatcaaaagaactcttttgacttgaatggtatcatgatccattgattggagcgagatttcattatctaagtcaaacatggtaaatgaacagcgtgtaatttctggactacgtgtgtgtagcaatgcgatatggctgttagggatgccaactggtgccattcgtacacgtttgagaagatttttggcaacgggcatttgcttacgaattagtgttgaatccgaatgggctaaacattcctgaattactgcaattaagtcttgcgaattgtattccagttgttgaatcttgattccgttgactagctccgagcaaaataatgtactaatcgatagcttagcaagttgttcgactgaatggggatgtttttcttcaactacctgtttagctggaactggttgaggatatttttgttcataatcttttaagtaagcgcggatttttattaattcatcatcaagcagtaatggactaacaagtaaataatctcttgagaagcccttcaatctcaaggttgaaaaaataagattgtaatttgacaagtctatttgatttaaggcagaaacacggctggttttgacttctttgatttcagaaaattctctttttagtttggcacctaagattgccgacgttccaatgccattttcacaaattactagggccgataaattacgctgctgattgcgactcgtgtattcattggcaaaataaagcaagatcaactgcaactctgacgctgtcaaataattttctggaaacgctaaatgccaatatttttgaatagctagatataaatcaggaaacttttgactaaggcctgccagaatttcaataggtgtatctggtaaaagagctactttatgttgtactaaaccaataacgtgtttcgtcactttagtcataaaactatgatctttttgaaaatcccaatgcatttcttcagaaacgtgttgaacgaattcttttactttgactgagattgctaattcgcgctcattataagtcaagtaagtgttgtgataatcacatgataataacttattagctaagtatgagacatcattttggtcaacctcaacttgccgcttttgcgcaaacaaggccataaaacggtaaacataaccctgatatttaagtgaatcagcactggggtggataaaatctagcttgcatcccgccagagttctttttatcgttaccgcaaaagttaaaattaactcaatcagcttttggtcactgtctagcttaattttaccaaacacgctttttttaagacaatcagcaacctctactagcaaagccttatcaatcattgtcaaaaacatgtctttgcttgtcgtttcattatgcagatacttaaaaaagttatattcattgatctgattgagcataatatcaactaaaacctgacgccgtattttttcaggcgcctgaattaacagtcccacaccctttttgcggatcaagtcaatatgatatcgttttagcgacctttcaaccgtattcaaatcactttgaatcgttgcttcactgacattcaggtcaagcgcaaattgaataattttacatggctccgtacttaaaagcaacttagctgcaattatcttctctcttttagctaccgaaattacattttgactgtgagattgttgcacagattgcttaatttcttgtaattgctttgaatcgccagataaaaaatattttcctttttgattttcaattttaaagtcgttcttctttaaatcgccaaattcgcgataaaccgtccggcggctgatctttagactctcttcaatttgtttgatacttaccccactcggatttcccaacaaaatttgaagaatgtgcttttgccgttgtgttaaaaacatcccatcatcctcgcttacgtttaagtttattatacttgaacgcaaaaaaagaagacagatctcaaatctgccttcttgaggatatttatttacatattaattattcaacagtaacactcttagcaaggttacgtggcttgtcaacatccaaacccttatcctttgaagcgtagtaggcaagaagttgagttggaactactgtcaaaagtgctgacatgtagtaattaatttctggcaacacgatcgtgtcatcactatttgcgaattccttgcctacaatagtaattactgaagcaccacgtgaagcaacttcttgaatattaccacgagtaagatctgcagtaactggatcgttaatcaaggcaataactggagtgccatcttcgatcaaggaaatggtaccgtgcttaagttcagctgcagcaaagccttcagtttgaatgtatgaaacttccttcaacttcaaagcaccttcaagtgcaacagcgtgatcaataccacgaccaatgtagaatgcgtttcttgattttacaatatattgatcagctaattccttaagcttttctttaccgtcaacaatttgttggataccttcagcagcgatggctaaatcatgttgtaagtcccaatccttagcatcttgattaccaagtttttcaccaagtgccttagctaaaatagcttgtaaggcaacttgtgcagtgtaagccttagttgaagcaacggcaatttcaggacctgcacctaaaagcattgtgtagttagcttcacgtgataaagttgagccttcaacgttagtcatagtcaaacttggaataccacgcttgttagcttccttcaataccacgcgtgagtcagcagtttcacctgattgagtcaagaaaataaagaatgggtgcttgctcatcattgggaagtggtaaccagcttctgaagcgtaaccaacttcggtaggaataccagtgtagtgttcaaaaatagttttaccaactaaacctgcatgataactagtacctgcagcaaagatataaaggcgatcagccttagaaatagcatcaataatatcttgatctacctttggttcaccattttcgtcaaggtagttttgtgacatgtgacgcattacgcctggttgttcatcgatttcttttaacatgtagaattcgtaagtaccctttgaagctgcgttagggtcgatgttcaaaacgtgaggttcacggtctacctttttgccatcaacagtttcaatagtgtaagaatccttggtaatgtcaccaacatcaccatcttgcaagtcaacaaaagtcttagtttggtcaagaacagaaatagcatctgaagcaatgatgttaaagccatcaccgattcccagcatcattggtgacttgttcttagcaataaatacgtggtctggttctgtgttgtcaacaagcaagaaagcatatgaacccttaaccaacttcaaagcttccttaaatgctgaaaaagcgtctaagttcttatcacgtgcaattttaccgatcaattgaacaactacttcagtatcagtatctgagtggaacttaaccccttgcaagtacttttcctttaattctgtgtagttttcaatcacaccattgtgaactagatagaaacgcttggtttcatcaaaatgagggtgagcgttatctacagttggcttaccgtgggttgcccaacgagtatgaccaataccaactaaaccttgttcatctggagtcaacttttccttcaagttagaaatacgaccaacagccttagttaagtattcgttaccatttaaatcatttaagtaaatgccagctgaatcgtaaccacgatattccaagttggttaatccatttaaaataatatctcttgcaggcttacctacaactccgacaattccacacataattttctcctttggtctagtttgctttgaagtaatggactagcttatttttattgttacagtaggtataatagtctttttgcaaaaatcggtcaagtacaaatattcaaaattggtattataattttaagcataaaaaatggctaccagaatttgctccgatagccatttttacttaagtcaattttaacttttattacttgtttttgatacccttaccttcatagcagtctctcatcaattgagaaatttgactaattaatggagctgatgggttagtaacagtgttttggtcgccataagcttcaacagctaattggtccaccttcttgtcaaactcagccttatcaacgccataatccttgaaggccatcttaataccaactgattcagccaaatcaataattttctgaactaatttttcaattaattcagcatcacttgaaccagttaagccgattgctctagcaatttcagcatagtcgctttcagcacggtaaactgagtaatgtggccacatagcaagtttttctggacgcttagcattaaagcgaatgacttgtggcaaagcaattgcgtcactgacgccacttggaatatcaaaagttgaacctacggtatgagcaattgagtgttccaagccaaggaaggcatttgaataagccattccagcaatcgtagctgcatcatgcattctctttctagcatcaagatcgccatcgtaagacttcttcaagttagcgaaaattgctttaatagcttcaagtgaccaaccacgagtgaagtcagttgccatggttgaaacataactttcaattgcgtgacctaatgcttcaaaacctgaccaagcaattaaacgtttgggcagcgtttgcacaaattgatcatcaacaattgaaacatcaggtgttaaagcatagtcacataaggtatgtttaattccagttttggcatcggaaataatagcaattggggaaacttctgaaccggtacctgaagtagttggaatacatacaagttggacaccattaatctttgggaaacggactactctttttctaatgtctaagaatttttggtaagcctcttcaaaactcatttctgggttttcgtagaataagcgcattgctttagcagcgtccattactgaaccaccaccgatagcaattacaacgtctggcttgaagatgttcattctgtgaacaccatccttgatcacatcagtattaggatcaagagttacagccttaaagacttcatattctttttgacctaaacgcttagaaatgatatcagtaacttcatcagcaaagccttggtcagctacaccttcatcagttacgatgaagaaacggttaacgtttggcatgtgacgaaggtagttagcagcgttatgttcgaagtaagtctttgatggtacctttacccattgcatgttatcacggcgtctagccactgttttgatgtttaacaagtccttagcaccaatgttgtgtgagaaggtattggcaccatatgaaccagtacccaaggtaagtgatggcaacatattgttgtaaaggtcaccgataccaccgagtgcagctggtgagttgactaagatacggcaagcatccatcttcatggcaaattcatcaataatcttcttgtcatttgagtgaagaccagcggtgtgacctcgaccaccatagttcaataaatcggtacaaatcttaaatgcatcgtcatggttcttagtacggtacaaagtgaagactggtgaaagcttttcagctgatagtgggaagtttctacctacgcctttatattcagcgataattactttagttgtctttggcacatccacaccacaaagcttggcaatttcataagctgacttaccagctactggaccagcaaccgtaccacgacgaggatcaataaagtgttcctcaaacttcttaatttctcctttgtttaagaagtagcagttccacttcttaaattcttctttaactttgtcataaatttcagtatcaacgacaactgaattttcagaagcacaaaccataccgttatcaaagttctttgataaaacaatgtcataaactgcacggtcaatattagcagtcttttcaatgtaagaaggaccattaccaggaccaacaccaatagctggcttgcctgatgaataagcagctttaaccatacctggaccaccagttgccaaaatagtttgaacacctgggttagtcatcaaatcggtcgttgcatcaaggcttggttcttcaatccattgaacggcatccgcaggagcacctgcagcaacagcagccgcacgaatgattttaccagtttctacacaacatttttgagcctgtgggtggaaaccaaagataatggtatttctcgtcttcaaagcaagcattgccttgaaaataacagttgaagttgggttagttactggagtaacacctgcaataacacctttaggttcagcaatcttagtcaaacctaattccttgtcttcttcaatatacgccgacggtcttttcgtgacgcaaactgttccagatattttctgaagcatacatattcttggtagttttatcttcaactacaccacgtttagtttcttcaacagccattttagctagtgggtaagcattttgttcacctgcagtagcaactgcttcacagatcttatcaacttgttcttgtgtgaagttagccatttgatctaaagcgacatgtgatttctttactaagttatcgaccatgtcgtagatttgctttttcttttcgtcctctgtaagagtctctttttgttgtgtcttagccattgtattattacctctaagatctactaattcttgtgaactaatttacaatgtcaactatagcacaataactttatttgtaaatgcatgaatttatgaaaatagtgaattaacaaagattcacatttcctcataatttcgctctaatgcaaatgaaagctattccttaattatttgtttgtgaattaacaaacttatttttaaaaaacagatttttgatatttttttaaatctaactatagagtctggtcatactaattgataatgataaaatattaagtatatgtgaaaagattgagaacattggggggcttatatgagtgagaaaaaaacacagaccgcttctggttataaacgaaccctaagcaatgcacacattcagttaattgctttaggtggaacaattgggaccggcctttttctgggggttggagacagtattcaccgcgccggtcctagcgttatcctgatatatattattgtcggtatcttcctcttcctgctaatgcgggcactgggagaactaattatgtccgacttgaacaagcacacatatattgattttattgaacaatatttgggtaaaaatattggctttatcacaggctatttgtattggttaagttggattaccttgggtatggccgaaaccacggccctaggaatttacttcaagtattggtttccaacactgaaaccttggattccaggaattattaccattgtgatcttgctgttaatcaatttaatttcagctcgtgtctttggcaacttggaattcagttttgccattatcaaaattgtcacgattattgccttcgtcatcttgatcctttacttactagtaactggtggcaaaaccagctttggtcctgttagctttgctaaccttgacgatcatggcggcttcttcgcccgtggcagtaaaggattcttacaaggatttcaaatggtaatcttcagctttattggagttgaattaattggtttaaccgcggctgaagcacaaaagccagagacaacgttgaagcgagcaatcaatcaattaccaattcgaattattttgttctatgtcatggctattttagaaattttgttagtaattccatggtccaaagttgctactaacgctagtccatttgttgaggccttaggtgctactggtattaaaaatgctagttctattattaattttgtagttatttcagccgccgtctcatcaactaacagttttttgtatagtgctggtcgattacttttctctgttacttttgatggtaaaggaaaatggaataaaacttttggacatttatcaagaaggcagcttccacaaaatgcattgactttatccgcattattgatgggatgtgcaccactaatcaccttggttattggcgatcaggcctttaattttatctcatcaacttcaactagtatgtttttaatcatctggagtttgatgattttaactcacatggcttacaggagaaaaacagcagctaatcagctaaacgattttcaaatgccaggttacccttatatcgattatgtaatcttgtcattcttcgttttaatgattatcctgctattgattttaccaagctaccgagtaccaatggtcgctgcaattgcaatctttattgttttatacatcatttccaaaatttggagtaatgaaaaagctgtttaaagcaaaaagtcgagttttttagctcgaccttttattttgcaatttttttaattattttagcaggatttccggcaactaccgtattagctggcacatctttggttacaacggcattagccgctacaacggcgtttttacctaccgtaacgccaggcaatatcgttgctttagcgccaatccaggcgttttgtttgataacaactggctttaattccagttcttttctatgctgtggatccagcttgtgattaactgaaatcaggtaggctccaggcccaatcaacacatcgttctcaattgtaatcccgcctaagtcgaccatcatcacattggcattaataaacacgcgctcgcctaatttgatgttgtgcccataatcagaataaaatggtaaccgaatctctatactagcagctattttttgaccaattatttcactaatcaattgtctaacttcacagctacaatgccgttgtgtatttaaattctgcaataatcgctgattctgttgggctagttttcgacgtaaatcgtgatcttctgtttccattattaccactcctttttcttgctctacttcagtttaaagggtaagcttatcaatgtgcaaagcttataaggtatgaagtataataacaattgtttataggtgatttaaatggaattacgtgttttaaattattttgtcgctacagcgcaagaattaaatatgacgcgagctgcacaaaaactattagtctcacaacctgctttatcgcgtcagatagcagatttagaggatgaattaggcgttaagttattcaaccgccagccgcggcacttaaccttaactcctgcaggacagtatttatatgaacaagcaaaagaaattcttactttagcttccaaaaccaagagtaacctacaatctagtgctgtcatcagtggtgacctaactattgctgccggcgaaagttttgccatgcaacgtctaatgaatatcgtcagcaacattattcgggattatcctacagttaaaattcatattctaagtggcgattatgaatttgcagaaaggcgtttagatacaggtgcagttgattttgccgtaatcattggtaatctacctttagataattatgcttctctgcagctccctgagaaggatacatggggcgttttaatgactaaggatgatcctctagcaaaaaagagtgctattacagctgaagatttagttggacgaaacgtcttaaattcacaacaagccgaaaatcgaaagtactttgattcatggttcggtaattataaagagcaaattaatatcatcggtactgttaacttgaatttcaacggtacacttttagttaaaaataaagcagctattatgctcacactcgataagctagccaatatatcagatgaatccaatctaacttttagaccaattactccaatgttaaaacagccggtaacagtaatttggaagcgagaaaccaataaatcacctgtagctgatttattcctaaatcgtttacgagtatcaattgatgacgattaacaaaaataacctagatcgaattgatctaggttattttttactttatttctttttacgactaaaacgttgcttcaatcgttgccataagcttaatgccctgcgcatatgatcagctggtacatattttcttattgctcgcaatacctttttggaatcacgtgccgcaaaaacaaatttaccatttgacttagttctgatttcaaaacgcggaatataacgtccaccaaagcggacatctgcaaccacataagttacttcattccaaggaatctgaacataatcttcaacgtttcgttcgttataaaattcaaaagctctatcgccgatcatgattttgccgtatgatgcaattcctctaaaccaggttgcatcaacagtgagatcgacttttgtattaattgacttagccatttattaaagaatgccccatacgtggaagagaacaccgacaacgaagataccgatgataatccagattggtgaaactttcttcttcaataaccacatacagaagaaagttaagagcaaaccagctaaaccaggaattaattggttcaagttgtcttgtaaagtagtaactttagtactgcttaaagctttaccgttacccatatcccattgttgaagagcggattggatacctttagcacctgatggaagcttgtcccattcgatgtaaccacccttttgaataggagtttgagaaacaattggagtgaacttgatgtttacccaacgttcaattaaggcacccaagacgaacatacccatcattgaagcaccacgggtaaccttttgaagcataccacctgacatatcactggtgatagctgaaccagccttgtaaccaaattcttgtgtgtaccataagaatgcgattctgataatattccagataacgaagaacaagataggacccattacgttacctgcaatggccattgatgcacctaatgcaccaacaattggacgaacagtgtaccagaatacagggtcaccaacaccggccaaaggtcccatcataccaaccttaacaccttggatagcgtcatcagtaacttctgcaccgttagccttatcttcttccaaagccaaggtaacaccaagaacaggtgatgctaagtatgggtgagtgttaaaaaatactaagtgtctttgtaaggcagcagataaatctttcttgtttgggtataactttctcaatgctggaatcattgaataagcgtaaccaccgttttgcattctttcatagttccatgaaccctgaaggaattgtgagtgccacataacgttaaaacggtcgcgcttggttaatttagttttcttatcagccattatataaatcctcctctatgcgttcattttaatagtcatcaatgatatcgccgagtggatcgccagtgccggcatcgccagaattattgtttccaccgttgccacccttagcttcaagagctaagtacatcaaagccattgaaaggccaatagcaccaagggcgatcaaagttaagtctttgatagcagcaagggcaaaaccaattgcgaagaatggccatacttccttacttgccatcatgttaataaccatagcgtaacctacggctacaaccatcgcaccaccgatagtcataccttcgtttaaccattgtggcatcattgcaagccaacttctaacagtacctgaagggattgctaaaagaagtgcagctgggatagcaattctcaaaccttgtaaacatacggcaatccattgccataagttgatcatacgccagttacccttcttagcttctgcgtccatgatgtgaacgatagcagttgaaatagtacgtacgatcatagttaagaacaaaccagcaacagctaatgggatagcgataccagtagcagtaccaatacccttaataccttgaccaccttcgatcaagataatagctgaagctactgatgctaaggcagcatctggtgcaacagcggcaccaatgttagcccaacctaaagcgatcatttgtaatgaaccacctaaggcaacacctaaatccaagtgaccggttactaaaccgatcaaagtacaagcaactaatggttggtggaattgccattcatccaagataccttccataccggcaagaaaggcaacaaacacaaccaaaatcatttgaatagcgttcatttatttactcctaattatttattactttttttcgtcaagtaaagtttgagccttcttcaagatagcatccatattacctggagcatctgaaggaacttttcttacatcaaacttaacgcccatcttttcaagttcacggaatgtatcaacgtctttttgattcattgataatacgttgttggcgttaacatcgccttccttatatgacattgaaccaacgttgatattcttaagatcaataccgcctttgatagccctcaatacatcttctggattttcaaacaaaagaagtgcatgagtgtttccaaatcttggatctttagcaatttcttgcatcttcttgagtggaacagtatgagccttaacacctgctggtgcagcttcacgaatcatactcttacgtaaatcatccttagctacactatctgaaacaacaattactctatcaggcttcatagctggaatccaaccagttgccacttgaccgtgaagcaaacgtgaatcaattcttgccaaaacgtacttgatatgaccatcaccaataacagtaccttctggaatgctcttcttactgcccttagcagcagctttgtcagctactggagctgcagcagccgtcttaggcattaagtcagctggcttagtcttaattccatctctaccaggttgaacaactgcagtggcgatgtgctttgcagttgcattagcatccatcattctctcagtcaatgcttgtacaaccattggtaaattcataccagcaacaattgcccatttatcatgcttttcagcaagccaatttgcttggttaaatggagtaccaccccataagtcaaccaagaacaaaacttcatcttggttatcaaatgaagcaattgctttttccattttgccacgaatgtcatctggaccttcatcaggctttaagataacatgtgcaaaattatcttgttcaccgaaaagcatttgtgcagattgtgcaataccatcggcaaagccaccatggctggctaaaacaattcctaccatgtaatttcctcctctagatcaaaaaatgaatccgcttttattatacgataaatatagactttaaaaaagtgttttttgaaaataatttcataaagtgccaatttgtttcaagcagtccaaatgccttgtctcccaagcaaagacagaaattagtctaataaaaaaagaaagcctgttttcatgatttgagtcgtttttcacaaatttggcttcctattaaaatatatgctggttggataatttcattttcataaaataacaaaaaaggaagccttccgcttccttctcccctttactccggctgtcagactcgaactgacgacatcttgattaacagtcaagcgctctaccaactgagctaagccggaatattaaaaaagagcacggcagcttcctttcctcgcaggcagttgcccaccaactactttcggcgttaagaagcttaacttctgtgttcggcatgggaacaggtgtatccttcttgctttcgccaccgtactcttttgagcttttacactcaaaactaaacataatccttctcgcaaaaaaccttccagtttgcttcgctttggtcaagtcctcgactgattagtactggtccgctccatccttcacaggacttccactcccagcctatctacctcatcgtctctgaggtgtcttactgcttacgcaaaggaaatctcatcttgaggggggcttcgcacttagatgctttcagcgcttatcccttccgcacatagctacccagcgatgctcctggcggaacaactggtacaccagcggtgcgtccatcccggtcctctcgtactaaggacagctcctctcaaatttcctacgcccacgacggatagggaccgaactgtctcacgacgttctgaacccagctcgcgtgccgctttaatgggcgaacagcccaacccttgggaccgacttcagccccaggatgcgacgagccgacatcgaggtgccaaacctccccgtcgatgtgaactcttgggggagataagcctgttatccccagggtagcttttatccgttgagtgatggcccttccatacggtaccaccagatcactaagtcctagtttcctacctgctcgagttgtctctctcgcagtcaagctcccttatacctttacactctgcgaatgatttccaaccattctgagggaacctttgagcgcctccgttacactttaggaggcgaccgccccagtcaaactgcccacctgacactgtccctggcctggcttacaggtcgaggttagagcatccttcaaacaagggtagtatcccaacattgcctccaataagactagcgtcctatcttctctggctcctacctatcctgtacatgtttaaaagatactcaatatcaagctacagtgaagctccatggggtctttccgtcctgtcgcgggtaacccgcatcttcacgggtattataatttcaccgagtctctcgttgagacagtgcccaaatcattacacctttcgtgcaggtcggaacttacccgacaaggaatttcgctaccttaggaccgttatagttacggccgccgtttactggggcttcaattcaaaccttcgcttacgctaagctctcctcttaaccttccagcaccgggcaggtgtcagcctctatacgtcatcttacgattttgcagagacctgtgtttttgataaacagttgtttgggcctattcactgcggctaaccaatctcttggctagcaccccttcttccgaagttacggggtcattttgccgagttccttaacgagagttctctcgctcaccttagtgttctccactcgactacctgtgtcggtttgcggtacgggtatgtcatctctggctagaagcttttcttggcagtgtgattaccacaccttcgctacttttaattcactcctcttcacaactcgtgttgctggttagaagcatttgactcttaaccgcacttgttgcttgaacatcgttccatcgcgatgcgtgcttcacctcctgcgtccctccttcgctcttaacgatttgacacagtacaggaatctctacctgttatccatcgactacgcctctcggccttgccttaggtcccgacttaccctgggcggacgagcctgccccaggaaaccttagtctttcggcggataggattctcacctatctttcgctactcataccggcattctcacttctaagcgctccattgatcctctcgattcaacttctccgctcttagaacgctctcctaccacgtgctctttaaaacacatccacagtttcggtactatgcttagccccggtaaattttcggcgcagcgccactcgactagtgagctattacgcactctttgaatgatggctgcttctgagccaacgtcctagttgtctacgcaactccacatccttttccacttagcatagatttcgggaccttaactggtgatctgggctgtttccctttcgactacggatcttatcactcgcagtctgactcccgtgtatggatatctggaattcgtagtttatctggattcagtaacccctgacgggcccctagtccaaacagagctctacctccattatcctctccacgaggctagccctaaagctatttcggagagaaccagctatctccaagttcgtttggaatttcaccgctacccacaactcatccccgcaatttttaacttacgtgggttcggccctccagtgcgttttaccacaccttcagcctggtcatgggtaggtcacttggtttcgggtctacgtcacctaacttttcgccctattaagactcgctttcgctccggctccgtcttttctgacttaacctcgctagataacgtaactcgccggttcattctacaaaaggcacgccattgcactttaatgtgctttgactacttgtagacacacggtttcaggttctttttcactccccttccggggttcttttcacctttccctcacggtactggttcactatcggtcactaactagtatttagccttgcgagatggtcctcgcggtttcaaccgggattcctcgtgtcccggcctactcaggattctgctaggcgtgcttgagatttcgcttacggggctctcaccctctctggcttaccttcccagataactcaactatctcttacactgccacgtcgcagtcctacaaccccaaatgataaatcacttggtttgggctctttcctcttcgctcgccgctactaaggaaatcgatctttctttctcttcctgcagctacttagatgtttcagttcactgcgtcttcctttgattagctatctattcactaatcaataatgcatctctgcattgggttcccccattcggatatctccggatcactgcgtacttaccgctccccgaagcttttcgtagttcgtcacgtccttcttcggctgttagtgcctaggcattcaccgtgcgcccttttctacttgaccttactcaagaattctcttctcggtcgctctacaatctgttctctttgattgtctcggttttttgcttggattatattcagttttcaatgtactagctctttgatcctttttctggatcaatggaggctaacgggttcgaaccgatgacctcctgcgtgcaaagcaggtgctctcccaactgagctaagcccccagagtattttattttcggccagacataactttaactctttttcttcgttatgtcaatgggcctaaatggacttgaaccatcgacctcacgcttatcaggcgtgcgctctaaaccagctgagctataggcccgactaacgcttggcgtttttccaatctttgaggtactaccctcaaaactaaacaaagtttctcagtgtgcttccgcttgctctggatacttctcttagcattcctgctctccatatccttcgcttccttagaaaggaggtgatccagccgcaggttctcctacggctaccttgttacgacttcaccccagtcatctgccctgccttagacggctccttcccgaaggttaggccaccggctttgggcattgcagactcccatggtgtgacgggcggtgtgtacaaggcccgggaacgtattcaccgcggcgtgctgatccgcgattactagcgattccagcttcgtgcagtcgagttgcagactgcagtccgaactgagaacagctttcagagattcgcttgccttcgcaggctcgcttctcgttgtactgcccattgtagcacgtgtgtagcccaggtcataaggggcatgatgacttgacgtcatccccaccttcctccggtttgtcaccggcagtctcattagagtgcccaacttaatgctggcaactaataacaagggttgcgctcgttgcgggacttaacccaacatctcacgacacgagctgacgacagccatgcaccacctgtcttagcgtccccgaagggaactttgtatctctacaaatggcactagatgtcaagacctggtaaggttcttcgcgttgcttcgaattaaaccacatgctccaccgcttgtgcgggcccccgtcaattcctttgagtttcaaccttgcggtcgtactccccaggcggagtgcttaatgcgttagctgcagcactgagaggcggaaacctcccaacacttagcactcatcgtttacggcatggactaccagggtatctaatcctgttcgctacccatgctttcgagcctcagcgtcagttgcagaccagagagccgccttcgccactggtgttcttccatatatctacgcattccaccgctacacatggagttccactctcctcttctgcactcaagaaaaacagtttccgatgcagttcctcggttaagccgagggctttcacatcagacttattcttccgcctgcgctcgctttacgcccaataaattcggacaacgcttgccacctacgtattaccgcggctgctggcacgtagttagccgtgactttctggttgattaccgtcaaataaaggccagttactacctctatccttcttcaccaacaacagagctttacgatccgaaaaccttcttcactcacgcggcgttgctccatcagacttgcgtccattgtggaagattccctactgctgcctcccgtaggagtttgggccgtgtctcagtcccaatgtggccgatcagtctctcaactcggctatgcatcatcgccttggtaagcctttaccttaccaactagctaatgcaccgcggggccatcccatagcgacagcttacgccgccttttaaaagctgatcatgcgatctgctttcttatccggtattagcacctgtttccaagtggtatcccagactatggggcaggttccccacgtgttactcacccatccgccgctcgctttcctaacgtcattaccgaagtaaatctgttagttccgctcgctcgacttgcatgtattaggcacgccgccagcgttcgtcctgagccaggatcaaactctcattttaaaaagtttgaatgattgctcattccttatttaagatctttgtctcaaatttattgcttgcgaattgacttcgcttcttgtttgggtttttacacccgcacacttttagcgaaactttgttcagttttcaaagtactacctctgtcttgcttttttgcaaagcagacagcttttatattttatcaaaccatcatttctttgtcaagaacttttttgatttgtttttttcgtcttgctcaagctttttctgctttcacctgacgacatttaaatatattaccagcttatttacttctttgcaagtactttttttctttttatttgttttctttccttacatgtctgtttttaagctctcgtcgcatctctcgaagcgactttattaatttaccttattttctccgctttggcaagtcttgctcttcgttcgcaatcttttagaaacgcttggacgcgctgtaattatttctttatttctatttcaatctacctttttctttttgcttactttatttttatccttacgcttattattcgagttttactgttttttctcttaattttagtacaaaatttttcgaaattttttcaaaataattcaaaaaacagtgttttgcctaatttttcactcaaaaatgcaaaaaaagacgtttatcaaattgatatagtcctactttagtagacagtacaaatatataaaattacgcgtggtgctagttaaatcgttttagttaataaaaaagtccaatcttgttagactcgacttgtaaatagtaataatagaaaagagtctgatctgattgaactgccttaagcttaagcgttttagccaccatttacaagttagttttaaagatttagtgataatttgtcggcactggtatcgtttgtatgcaccggctgagtttactcatcggcgaaatattgatcaaattaaaactacggacagtctgattttggctttacttatctggcaagctaagacaggaattgaatcacaaagaagattctgtgaatgtttcaattgtttatcacactcacgttttaatcgacgttcacgtcagctattgcaattgatttatcagatacggcaagaaatgaataaaaaggttgacctgaatggacagttcttgatcattgacagctttccggtacctgtttgccaaccaattcgcaactatcgtgctaaaatttttcgcggttatgccaacattggttataaggccaccaagaaaatttacttctatggtttcaaagttcatgtcattgttagcgatgacggttacattcttgattatgtcgtaacaaaagcatcagttcatgatgccagggagacagttgaactgatagaaaatacccatccatctaattactatcttcttggcgacgaaggctatttaggcaaagaactgcatcaacagctaaaacaaatgggttacgaactttggacaccatatcgtaaaaatatgacaggagctaaaaagcacaatgatcatcaattgatggctattcgcagaacaattgaaagcgacttttcgcttctgacctattacaatgccgagaacaatcgagcacgtagtctgataggctttcaaagccggttggaaattgcaattttagcttataatttggcttattgtctagaacgatttaactagcaccacgcgtataaaattgtactatctatgaaagcaggactttttgtatgtctagaaaaagtaaatttagctatgaagctaagcttaaagcagttaaacaatacataagtggcgaagcatcacctgcttcaattgcgaaagttttaggggctggcaagactacactgcgccaatgggtatatgcatttaaagatcatgggccagaagcattaagaccacataaatataatcaaagatacagtaaagattttaaactcaaatgcatagctgcctatttaaatggcgaaggctcatatgattatctaacaaataagtttggtttgcgaagtgctgcacagttaaagcagtgggttatcaagtataatagtcatcaagaactcaaggactacaatcctattctggaggcttatatgactaagagaaaaaagacaaccctagaagaacgtaaacagatagtgaaatactgcaaggatcatcaatggaactacaaggaagcagctcttaaatttggctgcagctatgcccaagtatacaactggtcaaaaaaatacagcgcaaagggaactgacggcttagcagataggcgcggtcatcgtttaaaagaagctgagctatctgaaactcaaaggctaaagcgtgaaattgaacagcttaaaaaagaaaatgatattaaagaccaagagatagccttcctaaaaaaagtgaaggaattagaaaggatgtgtttgctggacagccaaaacaaagacaaatagcacttaaacaacagcagcgaaattctctttacagtttgatcaaagaatgtcaccgagaatataagtggtcaattgaatggatgtgcaaacaagccaatattgcccggtcagcctactacaaatggcttaatcataagccaagcaaacgtgaactaagagatcaaaagattcttaagcgtattaaagaaatagctgagagcaataacagcctctttggttctcctaagatgactttggctttaaacaatgagctagcagacggtgaggccaaaatataccgtagaactgtggctcgcttgatgtgcgtgaatggcatctatactagcaaggccagatttaataagaggtatcgctatcaagctgctagaccggaagaaactgccgaaaatctattgcatagagacttcaatgccactaaacccaatgaaaaatggtgcactgacattactgaagaaaaaattcctggaacaagtcaaaagatttatctctgtactatctttgatctatatgatcgtttccctgttggctatgctttaagcaagcgcaatgatacagccctagttaacgctgctctgtcaactgcttggaaaagagagcccaatagtcatgcaatgcttcatagtgatcgaggatttcaatttaccaggatgccttttaagcatgagctagaagaacatggcatgccacaatcaatgtctagaattggccgctgtattgataatggcccaatggaaggctggcaaggtttaattaaagaaatgcgagaagttctttatccgaaagcaaatagctatgaagagatggaaaaagcctttaaagcaagtattgaatactatattaattatgatcctcaggagcgcttcaatggcaagagcgcaggtcaggttagaaaagaagctaagaataatccagagaatataatttcatatccaataaaacaagataaaagatataaagacttttggaaaaagattgatgaaaagaaaaatcagctcgcacaatagcgaactgattaatcaaattaatttatatatttaagctgtctacttgacacggtacggatcaaatataatcattcgataaacgtctcattttatatctttagatgatcaatctttagtgtctattcatcttttttcttacgtttttcaacgccaagtaaactaatccaacctaaaccagcgagtaatgtaccaatcaaacctagtgtgtgtttgtgttcactaccagtttgaggcaataaatcttgcacggacttcggttttgcatttaatttgttagctaattgctttctttctgttttccctattgtcctcttgccagattcaatgtctgctgccttaactgggccgttagcgcgtttctttcgacctgtaggcataccttcatgcttaggattgttattagagtcatagcccttcttatttgctttagaatgattatgcttcttttcactttccttatttggctttgccggtttatctggcttcggctctggatttggttttggcttcggttgaggttctggttccggagtaggtacttcatcttgcttgtaagtaattttaatattactatcagccgtatctactgaaaccttttccgctgccaccttactttgtgaagcagtgtagccactaaatgttggagcagtatatgcatcccactgagtattaccatctaccctccactcactgtatgtaactttgccagtaactttatcaaacgttactttttgcgtggtaatcagcttaccacctgaaggcgtaatgactgtaattattctagttggagtcttagtcaaagtatccaagtgatcatagttcttacttggatcaccttgcactgggcctgttggaacatcccttggtggagtttctggagtaacgataatggtgtcgtgttcaacccttacagttacagttggaatgccatcagcagttgcaactactgtcttagaaatatcctgtcctgaaacaatcttccatcctgctagagcttgtggatttacatctactgtttcactggtcttgccactaagcggagtttgccctacttctttgccatcactatcaacgtaagaaatcttccccgtttgagtgttgacagtataagtagcagtgacttcactattggcaaccagctttccagtaaccaagtcatatacggcagtccgcgtaaattcaacggtctgtttcttttgatcttctgaaatctgagctagttggcaattcttgatctggtgctaactcgtagttctctggaagcttcaaatcaaggttatcaacagttgagccagcaacgccagacttagtaattgtctgaccaacttgcttgttaccttcttgagtatcttcaaattcaatagttaaagttgcatccaaagtaaacttagcctttgaagaaatattcagcttgtagtttggatttgctttttcaagggcagtaatactttctggagttaagttaattacataaacgccagattcagctggaattccatttgcaaattcataagtcaaacctgccggaactgtaatagcagttggaacattaactttaaagtttgttccatcaattactggtacagtgctttcttgactaccagaaatcgttacattttcttcagctggactaattacataagtgaattgaccactttcagaaactgcatagttaggattatcatcttgcaatttcttcaatcccttagcagttaaggcaatgtagtaagtaccggcatttgttggcgcagaaattggcttaccattggcatcgacccattcataatcaccagctgctaggttagcagtattcaacatttcaccgcttactaaaccagttggagtgaatacaccgaagttggtagcttgagtgttaatcgttgcaggttgaccatcgtacgtcttgccatctgcgcccttactattaccgtcaagaactacattaagatccttttgtttaattgtgtaagtggcagagcctagcaggtcttcagcatccaaggtgacatttccttgaccagcgtattggttaagggctttttgcaagttaacaataccattggcactcagcttaatcgtgtaagtaccagcattaactggtgcgctgccagcattccaaatataatcaccgtcttgcagagcatacgtactttcggtagttgaacctgggaaagtaaagtgaactaaaatttgaccattgctgttaacttgtgcagttgttacagctgtaccatcaaatgtcttttggttagagccattaagttttgcgtcagcagtggctgcagtaactatgtagttagctgttgtcttaaatgtccacttgtagttagcaccattattaccagttagttgcttaagcttttcttgaccagcctgtgacaatttaacttggtaagtaccgacattcgttgcattaccaacaatttgcaaatcgtcagcagttaacttaagtgtctgagcttcaccatcagcggagtaaaccgtcgcatcgtaggttacgttgtacttattcaagttaagtccacttggtaaggtttgcttagcatcataagtcttgctgtcaccactattcagggtaacagtagcttcgccctggttaatggttaatgtacccttagtagttacatcagctgctacttgtgggtatgcgtagttagtacccaaagctttttcaatgttatccaacccttgcgcagataattccacgtggtattcaccgacattgcctggggtttgatcaaagatcaagtcaccacctttagcagtgtagcttaaattagtactattagtactatttttaccatacgtatatttacaacaacataatccttgcctggatcaggaacattaacttgccaagtttgtccagcttctttaggtaggctccatgaaccataaatcactttaaatcctggcgttgttgaatcacctgctgtttgatcccattgccaattaccataagtaatcgtgttattagcaacatttaaactaccagtctgggcatagaatacctgtatttgtgaatcaggtgcaaattgttgaccattcttgtcaccaccagcaattacatatttagccgttactgttctcgcttgctgttttactggaatatacaaaacagtgtgaactggacgggcttcataaactgaggcgttctcagtatatgctagagactccttaccctcactagatgtatcttccttattccaagttgggtaaacaaattggtttgctgacctggatcgccgctcttattgtaagcactataagaaacttccttattattttgagtagaaacatctttagtatcttctggactagtagcttttttatcttctgcctgtttagttgaattctgctcggttgaatttttgctagtcaaaggatcggtaccgctaacttctttttgagcagtagtatcgttatcattcttatcagctgtcgtagtctgatcatttccagtatctgtggtagtcttcttagccgactcaacctcttctgtttttactggatccgtagtatccgcatgaaccgtttgacttgtattcatcgtccaaagcaaaacggaacaaactccaatgttcaattttctaatactaaagcgctgcttgccttcaaagtcatttttattaaaagtcatagtctctcaatccccttaagttatgttttatctctaacttatagtctttctattacgcggttttattctattcatctattttaatcacaacaaaaaagcaggcttaaattatatgcaaaaaaatcgttattttaagttgtcagtcacaacaactaaaataacgattttattgtgctcattttttaattaaatttaggaattaaattaaacctgattctttagtaatcttcttcataccattcatgtaaggaacaagtacatcaggaacagttactgaaccatcttcgttttggtaattttccaaaatagcagctacacaacgaccaacagccaaacctgagccatttaaagtgtgtgccaagtgaagcttgccgtcttcatcacggtaacgaatttgtgcacggcgagcttggaagtcagtacagtttgaacaacttgagatttcacggtacttgtcttgtgcaggcatccaaacttcaaggtcataagtcttagcactagtaaaacttgcatccccagttgaaagagcaactacgtgatatggcaagcccaacttttgcaataagtgttccgcattatgagttaacttctcgagttcatcccatgattcgtcaggcttacataccttaaccatctcaaccttacggaattcgtgcattctgatcaaaccacgagtgtcccgtcctgctgaacctgcttcacttctaaatgctggtgacaatgcagtaacattgattggcaacttgttttcatgaataatttcatttctgaagtagtttaccaatggaacttcagcagttgggatcaaagttaagtcacgtggcttatctggatcgtcattatcaacgatggtataaacatcttcgtggaacttagggaattgaccagttccttgcattgatgcatcgtttaccaagtatggtgggataatttcggtataaccttccttagtgttttcatcaaggaagaagttgaagacagcacgttccaaaagcgcaccagcaccgatgtagtaaacaaaacgtgcacctgaaacctttgaagcacggtcccagtctaagatgccaaggtcagtaccaatatcccagtgagcctttggcttaaagttaaattcagtagttgggtgccacttacgaacttcttcgttgtagctatcgtccggaccaattgggtctgaatcagctgggaagttaggcaatctaagcaagatgtagttttgcttttcagttaattccgcaacttccttatctaagtctttgatttccttacctacttcacgcatagcagcaattgcatcgctagcatcttctttgttacgctttttttctgcaatttgcttagaaacgtcgttacgcttagcctttaattgttcactcttagtcaaatccttacgacgcttagtgtcgatttcaactaattcatccaattcttctggcttaatgccacgcgtagccaactttttctttgaccaatcaagattctcacgaatcactttaatatcaagcatataaaacctccgtaatatgcaaaaaagagccgacttatccctacacttgggacgaatcggctcttacacggcttcgcggtaccacccagcttcagtctatctagactgcacctctttaccagacgagtaacgacgtcaaaccgtgcaactattaattgcccacattattgaaatctggaagcgactatgcattcactcgcaccaaccgtgaactctctgaagcagtcttaggatttcgtgtttgcatttattttaagccattcttcttttttgagcaaataatatttttctttaaacgaaaaaagtgcactaacttgtgtgtaatcgacagtataaacatactgaaatcctagtgttttaagcaatttctgtgatttttcattatcggcaaaagttccagcccagacttctacttgctttttctttttaaaagcataggtcaaaatcaatcgtaaagcttcagtcatatagccgtgaccttcaaacgactgatctagcaaaaagccaacttctttagtctttaataggccactcttttcatctaagccgcgttcatacaattcaaccagaccgatcacttcattgttcttgcgcaagcaaacgacataactttcaggacgcgacatatattgcttcacgccattaaccgcctcagtcagattgcgatattcctcaaagccagccatcttgtggtagcgcggattgccaccccacttcaataactgctgtgcatccttttcttcaaaaggtctcaaatatattctcttagattcaagcattagttacccatcagcttcaagagccactttgcaccaaactgtaggcctatactataggcggcaattgtccatggcttacacaaaataataatccaaaaataagtccaaaacttcattttagtcaatcctgctagcaggcaaagcacgtcatcgggagctactggggcgagaatacataatgcaaagaaccaattaaatttattctgattctctgtccacttcatatatttatcaagcgtttcttccgaaacaatatgcaaaataaagggccggccgtagtgtctagctaaaaagaagttgataattgagccaatacaaatccccacgtagttataaataaacccagcaactgggccaaagaagaccacgcctcctaataaagacacgcccccaggaataattggaataactacctgaacaatttgaatcaacacgaaaataatcggaccaacaatttgtttattagccagataagcccgcattttagcttgatcggtaaagatccccaagcggtaccaataaatcaccagcaacacgattgcgactccacaaactatagttgcaatattgattaatttacgactagccttagtcgatagatgcattttctcgccttccttcatcgcctagtagttcaattttaacaaaaatccagcccagataccgtaaacatgcaaatctaaaaaaagttttattattttagctactttgggcagatactatataataaagttaataagttattagaaaggtaggcatcttatggttgtaattaagaatgatattgtttatgacaagactaaagaattaaaaacggatatttactatcctaatgatacatcttctaataccaagattttaatcttctggcatggcggtggctggtttagaggtaataaagaaagcgtaaaaaatctaggtattcgctttgctaatgcgggctttatgaccttcatccccgactactccttagcacctaaataccactttcctgctgctcatgaagatgcattgcactttgtcgactggctgttgaattctgaatacactgatcaagacgatatcaaaaacattgttcaaattggagccagcgttggcggtgaaatggcaattgaggttgctgggaaatacggtttccctactgtcacctggtctgctccagttgaatattcaaactggattaaagatcatcaagatactaaagcatccccagatgccgctaacgattttggcattaccgatcctgaaaagatcagacaatctttctacaagcacttcacattaacctacacaggtactgaagatgaggctgtattacaaaaattagacgctaagtcatttgactatagccatctcaagcaattaatgatgattaattccgcagatgagttgacaccactagctacagtattggattttgttaagttcttagctgacaaaaacttaggcgtacagctcctcgtaattcctggtcacggtcacgccatggcctatggtcccgattatgtagacgaatcgctcgattttttatatcaaactattaagagacaaaattaagtatgattaacatccaaaaattcgttcaagtcagaaaaaaactaaagttatcacaaactgagctttgccaaggcatttgtacccagtcgaccttaagtaagtttgaaaataatgggcaagtgccttcatttaaaattctcaagcagctttgtgaacggatggatattgatgttagcgatattatggacagcagtgagcacaaatatatcgcgcatatcctgtttgaagcggattttgcttttatcaattttgattacagtaaaatttttactttactttcacaaatcaaccccgaagtagacctaaaacgccaaacaaatcggattcattatcactatttgcgcggacaatatgctctaagaagtgatcgcaatcaaatgagtgcgctcttttatttcaacaatatcttgaccacccaggaattgcctgaaaatgatatttaccgcttgttggcattaaatggttgtagtcaaatctatgctaaacaaggtgaaacagagaaagccgagcactattatagtcaagtattaaagaacattatggacgtcaagatcgataatattttgactacaatgcatgccttaagtattttatgtgatgccggtgaattctatggcgaacgaaaaatgtatcgtgagtctaatgcattattgcgctatgcctataagattggcgctgagaagcacgtgattttttacatggcacgcatcctattgcggcaaggcatgaatgatattgatcagtcaaaaaagaaagcaattgctatccaacatttgcacgatgcctgtgcttttgcccgaatcaaccgcaacacgattacgctaaatcaagctaaaaaactactaaaacaattaaatggctaacaaaaaatcccaaaaattggggattttttagatgatcttataaccagtaaccggcttagcaggtactgcattaaaatcatacctagctaattgttcaagctcagtattgccatcaataattgtagttacgccttgcgcaagcatcaggttcattactttatctttattaggatccgtggtaaatggcaccagtactactggcttatgcaaagcacgtataaaaccaatttcaaaagcactaccatcatcaatgttatccatatcatacaagaaaacaccgcaggtagcattaacgattccttccaaatcattattatatgtagcaagacgccaagtcatgctacggatgccaccaatttcaggattcttttcatccgggtcaacaaaattctgatcaaacgggaaatgcactctgactacagttggattttgttctaacaatgcccgtgcttgatcaacgcgagcgcgttgttgatcattataaaatggtgagcctaaataaatcttagcggttgaaactgattcggtcatgcttttatcctttcgtgactaaaaaactattaaattatttttcattctagcatgtcttttttacaacgaaaagcccaaattactgcgtttttactgtaaacgctttataatagaaacataacttattgaacataaacattaaacttattggaggaattattttgtctagatatcaatcaattaatccatataccaacgaagaatttgcaagctatgacaattctactgccgcacaaattgacgatgccattaacttagcacacgctttatataaaaaatggcgtcatgaaaatcctgagacccgcagtcgtcaattacacaagatagcagatgccttgcgcgagcacgaagatgacttagccaaaatgatgaccttggaaatgggaaagcttttgtgcgaatcaagagaagaagttgaattatgtgcttcaatttgtgattactatgccaaaaacggggtcaaaatgttggctcctactccaatcgaatcagacttaggcaatgcctattatttgaagcaatcaactggcgttattatggcttgtgaaccatggaatttcccactttatcaagttattcgggtcttcgctcctaactttatcgtgggcaacccaatcttactgaaacacgcccacaatgttccaggttctgctgctttaaccgctaaaatcatcagacgtgctggtgctcctgaaggcagcttaattaacctttatccaacctatgatcaattaagcgatattattgccgatcctagagttcaaggcgttgcattaactggttcagaacgtggcggttcagctgttgccgaagctgctggtaaaaatttaaagaaatcaaccatggagcttggcggcaatgacgcatttatcgttttagatgatgcagatccgcaagtattgcgtaacgttttaggcgatgctagaacttataacgatggccaggtatgtacttcatccaagagaattattgttgaaaaatctcattatgaggaagtgctacatacgcttaaaaacgtcttttctaatcttaaagcggatgacccacttgaagacgatactaccttgccaccaatgaattccgaacgtgccaaggaaaaattagaagctcaggttaaaaaggccgttgacgcaggagccgagattttttaccaatatccagagattgattctaaaggtgccttcttcagacctgtaattttgactaacatcgacaaagaaaatcctatttatgatgaagaattatttggccctgtagcagaagtctttgtagttgacgatgatgacgatgccattcagcttgcaaatgattctagctatggcttaggttcatctgttatctctaacgatatcaaacgtgctcaaaacgtggccgctcaaattgaaactggtatgactgtcatcaatggccgctggattacctctggtgaattgccatttggtggcgtgaagaagtctggctacggtcgtgaattaagtgacttaggcatgatggcctttgttaacgaacacttagtaattgatgttactaaaaataatcaatagtaattttgggtaaaacaaatacgctggcaactggcacaccagcgtatttttattgctcatttttagttttatttttcttaaacagattataaccagctaaaatcgtggttaacacgctagccaaaatcataaagtaagctgaagctccaagggaaactgcatatgacataagttgactggttaattgagccagcaccccagttgaagcacctactgcgcttgacatttggaaaactatataaatcaaaaagactgattcaatcaaagaaaggaaaaaggccaaagtttggctagccttagtatttttcaagacattataaataatgaaaatcgggaacaagaataataacagccaaacaacgtaaagaatgagtgcataccatgatgttgcgccagatgaaagtaaacgtcctgctaaactgaacaatacgttagaaatagacattctctgagtataaaatgaggcacccgaatcagtaaagagaacaattaaactgactagcgctgtcaaaatgaccgaaatctgcacgtaattgaagtggggcttgcgaccatcttttatttcacgcacacgattttctacccgcggatgcttttgaacaaactctcggtttttctctttaactttgcttccacgagcatcaactcgattaaaaacttcagagccgattcgatcaatcttttgcgtcaaccgtttatcaaccgtatattgttcaatcttgtccttacggtcacacacaatataaagccaaaccattaaagctaaaaagctggtccaccctgctgctctagagaaactcattagaattaagagcaaaacgcccaataagaaaactaaagtagcattttttctaacccatgcaatcattctctggacagtagagttttgcttttcaggaataaattcttcccgataggctgcacggctgataatcttttcgccttcatctggttcttcaaactttgctttttggtgctgatctgtgaaaaagtcgtctcgatatttttttagattgaagccacagtttggacaaacatcatctgtttcactaatttcatggccacaatttggacaaacatcatctgtttcactaatttcatggccacaatttggacaagtagtcatataagaattcccttctttttcaatctgttaatgattattataacatggatcgaaatttgagaaataaaacaaaaaagaccgaacctttacgattcgatctgaaaaactatttattaattatttttcttttttcttcttttggcaaacttattaaggtcaattccctcatatgtcaacttagtagctgctgacatagtaattggcaaaatgaagaccaagatgagcaaaccaatatccacggctaaggcaacttcaatcaaagttggaatacctgatggaatcaaggctgcaaaagtaccacctaagataattgcggctgaaacaacaaccgtaccaatgatggcacatgcctttaagattcttgcacttggagtagtgtagccttcagactcaagttcacgataacgagtcatcaggaagatactgtagtcaacacccaaagcgatcaacataatgaagctgaagaatggagtgttccaagtaagcattgatttaccaagaactgctttaacaatccattgattgattgaaagtgagcagaggtaagcaataagtaaagtaccaagaatgtagattggttgcaataatgaacgagttacgaacatcaaggcaataccaataccaattaacatgatggcagcagttctaaggaagtcgccactggcaactgtcttagtatcttcaatctttgaactttgaccacccatagctaccttagcattcttcaaagcagtaccttgcaatgacttcttagccatagcacttaattcttgtgacttcttagtagcttcggttgcacttgggtttgaatcaaaaacaacaataatttgagctgacttcttgtctgggctgaggtaaacatccattgacttcttgaacatatcgttcttcaagaattccttagggatgtagaaagtatcagcggcagctgatgaacctaaacctctgaggtaggtttcaccttgacctaaaccactattaacagtgtcaatacctgaagtcaattgtggaactttgcttgccaacttaccagcgccagcactgagttgtccagcacctgtgttaagttgactgatacctgaaataagttgtggagcttgaccagctaattggccgataccactattaagctgaccggcaccagtggcaagagtacctaagccattattcaaagttccagcaccatttgcaagagtgccaagaccattgttcaacgtacctgcaccgcttgcaagagtaccaagaccattatttaatcggccggcaccattattaacttggtttacacctgcaccaaggcgactagcacctgatgaaagtgaaccaaggccgttactcaattgaccagcaccgttattaagcttttgtgcaccagctacaccttgtgaagcagcagattgaacttgagttaagcctgaacttaattggttcaaagctcttgctgcacctggaagagccttgtttgaagcttgagctaaagcattaacctgagcctttaaagtttgaagctgagtcatcaagttactttgttgcattgcagccattgagctttgcaagccctgagctgctgaagtagcatttgccattgctgacttcatcttatcagtattagcacctgattgagccttttgaacaacagattcaaccgcttgagtggcagccttagttgctgctgcttgagccgcttgtctttgatcagctggtactgattgcacagctgatgaaacagccgatgaaattgctgattgaatttcagattgatttactgaacttgagccagcattacctgctgcactttgcaattctttcaagctattttcaagatctgcagcttgtttttgaactgtagctaaactattagttaacgatgaagtatcaaccccaccaccaatagcttgattcaactgctgaatactactattaatttcaggcaaagcagtttgaagttgagcaagttgttgcttgttagagccactcaattgagttgaaagttgtgaactcaattgttgcaattggttaaccatttgttgggtaccactttgcaaactgttagcaccattcttcaaacgatttgcacctctaactaagctgcttgcaccactttgcaatgcatgagtaccactttctaaacgacctgcaccagtttgtaaacgaacagcaccgctttgcaattggctagctccactgcgtaaacgatcagcaccactaactagttgacctgaaccgttttgcaaacgagttgcaccgctttgtaattgactagcaccgttttgtaaacgactagtaccactaactaattggctagcgccactttgaagacgactagtaccattttgaagttgatcagcgccatcctttaagctgttagcaccgttagcaaccttgtttgagcctttgctcaatttacccaaacctgaacgagcttgatcaacaccgtcgttaaccgtgtttaattgattgttgacataaagcatatcaattggttcgccgtaaggttctgtaacagatgtcgcaaatgaaacatcttttgaagcttgaagttgcttagtcacttgatcaattaacttcaaattttcttcattgtctaatctatgcttgctttgaatgtacaagtatgatggttcagccatccctttagagaagtgcttttgtactatcaacaaaccttgcttagatggaactgaatctgcaatttcatcagtgtcatcgtagttcaagtgacctgagtacattaacatgaatggcacaacaacaactgctaacacaaccaagtaaataattggatgcttcaatatggcagatgaaataccatgccataacttgtcatcactttcaccagtaaatttcttaactggccagaacattttcttaccaagcgtagccataaagaatgggttgagtgttaaaagcactaccaataaaacagcaacgccgaccgcaacaccaacagctgattggtaaacggagaatttagctaaacttaaagcagtaaaaccaattaagatggatgaacctgagtaaagaattgttttaccagcattgcgcaaagcgtcatgcatggccttatacttgtccatcccttttcctagattttctttaaacttgtcatacagcaaaatgttgtagtcggtaccgataccgaagagcacgataaccataaacacttgcgtaaagtttgaaaatgggaaattggcgcttttaactaaattagtaacaattgagaaggaagtaaggaatgaaacaccaactgtcaacaatgaaataagtggaacaattggtgacttaaatacgataaccaaaacaataaagataaagacaactgtaatggcttcagtcttcttaattccctcttgaattgaagcggagaaggcgtgctgcaagacatccgcacccgttacataagtacgaagcccttgcgttttcgcggccttgttcatttcgttataaactttttcaatcgtaccatgactcttagccacattaaattgtgctacccaagtcgtgccatcttttgattgaagtttctttcttgtagcaatattggaatctggaagtaatgaatccttgattccgtacttgcttttatcattagtgaacttatcaagcgtattattaatagcctgtttatcggcatcagttagcttgccactctttttgttaaaaacaagtgctactgcataagtgtttttctttttcgagccccaattgttctctattgactgtgccacattgctttgcacattacttggcaacgtaatgttagagtgatcattagtcagctgcgtaatgttaggcaaagcaacaacggaaataatcaatattaaaatccacgcaatcagttcgaaaacatggttcttcagaaatttctgcactttcctatttcctccctatttgttgtaaatcaggtactggttctacaagccgtaaaatcatttcatgataattacgattagattcatcttctgtttcatctccaaaagacttcgatttatccaaaaaaacgtaccctaatacggcgccaattaaagcatgaaatgaaatgacactttcttttttaaaattaagtctttcacccattttaattaaatccaagatttcttgattgatggccgcatcctttggatattcgttcaaatgatacagaatacttgataaagccggatcgcttaataaaaagtcgcgcacaacatccgcaaacttaagcaatgcatccctacctgacataccgattagatcgttcatcaactcatgacgtaagatcttaatctgtcttgcaccaactagtgatagcaattgtttgcgtcctgaaacgtaatgataaagcgactgtgagcggacatcgagcgccttagccaatgctggcaaagttgtagctgtcagtccttttttagaaattaattcagtagcttgatcaattattttatccagatcaagatttcttttctgtgccattttcatccctcctttgtcttagcatagtaaataatatacacctacagtgtgaagattacaatctacatagtgtaaataatttattttttctataaaaaaataatgaagccttctcggacttcatcatttccgttacttatgcttttttataaaccaagcattaaccgttttgcccaatttattaaaattcttgtgttgcgtgctccaaacagacatacagtaagcacgtccgttagtctgaacaattgcgacagcaaaatcatcatcaccaattgcataaatgccgccacttaagccagaaactaaacttggtcgctctttagctagggttgctaaaactcggctagcatattgccgatttaatacccgaccttgatacaagccaatcattgttttagctaaatcattagctgttgtctggccagtcatatttgagttgaccttagtttgagtggcacccatttttttagcaacttggtcaatattattaactccaatttttctagttaaggcactagctgcagttttgttacctttaagcattgcgctacgcaaataacttacaccataggtaataccaacttgaaacatcttatcacccttggctttgtcttttttgctaatcttaatcgcagttcgcgaccccatcttgcctttttgttcttgctcatacaaggcgatcagtaaaaataaccgcattgtttttcctgcgtcatgagccttattagtattaaaaactacggcaaagtgactagagttagttaaatcctgtgctactacctggaagctatcatcaatgcccataacttttttgatttgcttgactagcttctgattactgcctttttgagctttaacatggttagaatattcaatcgaattaaccttgggctccttaggcttttctaattttttaacctttggctccttggtcttctttttattcttagcgaccttgctgttatttggttcaacaatctttaactgcgcgttttccacccgctttatgtttgatgtatacaaaatgaatgcaaataaagtcacaattaaagaaccaattaatattttatgtttcattaaaacgcctcaattttagaagaaatgatgccttttcatcaaaatgactaaccaaaccattaaaacaaccatcaaaataatgattaaaacccagtcaaatgaattttttaaaattggtagactaacattcatcccataaaaaccggttaaaatagttggaatagttaataccaatgaccacacagttaagaattgcatggtatcattcaaattattgttcatcatattattactggtagctgataaagtcttagttacctgctgggaaatctgcaccatttctgcagactggcttgattcaatcaagacgtcatccaagcgttcactggcttctttagtgaagtctaatttgctgtgattcaggccatgcaacatgattaaatccgtctgaattgaacttgataaataaactaaacttttttcaatattcgaaagttccaccaaatctttattgttaatgtcatcagacaacttctgatctaggctgttacgttcaacgtcaagttgcgttacggcacgctggaagtattgtgatgaatataggaaaaagagcatcaacaactcagtaacatctttagcttcagacaaacgctcccgcatatgttcatcgttgaattcatcaaacacatagctggttgattctgtatggaaagtaaagatattttcacccactactaaaaaagtgattgggtgtgaggtaaagtgcttaatcgtgttggtcggccaaattggcacatcgtaaacaagcaagtggctcttagtatggacgtcatagtcatagtgaggacgttcgtgacggtcagaaatataagagataatgtcaggcgtaaaattaaaatcctgctgcaatctctcactgtcttcttcacttaaattattgatgtcataccacttatactttgttcttaccggaaaattttgttgtctaatcaaccagctcacctcaacttttattttattacctagtaaatggtaccatttttctcaattctttttccacaaaaaaacagaccttacggtctgctctttgaaatctaattgctatttaattttattgcttccaagcagcatcaaatttttgcttaccagtattaatttggctgttagtattttgacccttttgggctgcagcaaagatattttgcaaaatgctgttcaattggttgtatgcagcatttgaattcttagcaacaggaacactgtacaagttcttcatagcatcttgaagtttagcaggaagcttaatgctcttgttattcttgtattcactagattcgattgcactattgtttacaggaatgtaaccagtagcattagcccacttaatttggcttgacttagatactaagaacttaatgtacttaaatgcagcagctttttgttcagcgctagcgtggttaaacatgtaaatatcagtaccttgttgcatggtgtatttgccaggacgtggagcaacatcataagtaaacttgttacctacaccttgcttaacaaagccttcacctgcagaagtaccaacaaacattgcaaccttttcgttagcaaatggacctgaaaggtagtgttctgaaccagctactctgaagtaacccttcttaataccatctgcatagaagttgagaactttctttgaagttgaaccactgaagttaatcttatcagtaaagttcacgccttcgtccttcataccaagagtgtagtagttggatagtgaatcaaaaccagcacctacaactttgtggttactcttcttgtagatagtttctgaaacatccttaagttcttccatagtagttggaactttcttgatgccatatttcttaaacatggtcttgttgtaagtcaaagtttcaattgacttgttaaatgggataccgtattgagttcccttaatttttgcaccatcaagaagttcagttctaatgtcagatgcctttgcactgccccaaccaacattcttgttgttgatatatggggtcatgtttacaagcatcttgttttgagctgcgttccaaagccaacctggataagcttgagtaatagtaggtaagttatttggtgattgcaaagttgagttgatcttagcttgcaaatcattgtatgcaccttggttttcaagcttaacagtaattttagggttcttcttttcaaattcattagttaattgctttaaagtagaaccttgtactcccggcatagcgttccagaagacaactgtagtcttcttagtaatctttgatggaatcttctctgaacttgatgaagaagaattgccgctctttgaacaagcagcagtgccaactagggccaaagtagcaacggcagccatagtaagtttcttactaaacttcatttggataaatcctcccaaaaaataaaactaaacaacaatatgtttttgatttactaaagcgtgattgtttgaccacgtttaggtaaaatccgttctccatatgggttctcttccagctctggatgcaatgtgtgcaccggtactaaaacagctggttgaaccccagcaatgatttccttgagttctttttcatcggcatggcctgaacagcgcaacgccttatactcaatatcattgttagctaaagcctctacaaatggtttgtaggcaggatcaaaatcccctaatggctcagcatttgagtggatatacaaaccacccttttgcagcttatcataatcggtgacaacttgccacatgtatttatgattatctgctaaaagctcatcatagctaacttctagctctggcttaaggtcagcatagtgctcctcattaggcatgtaatagtaaggatagtcttcatccaaactttcattaatcaaatgggcacgctgagcatgtaaaacgacctttcttggtgaatcggcaatgattcgcaataatcgttcaacattagtaggataagtattaaaagtgatttggcgttcaggattagccttttgcaggcgcacgatttcttcagttagttctacttcattcttagggccagtaaactcttcactgttttcatcatgcttttcttctggccaagaaacaccagtaccttcaatgattagcatatcgctatttttagctgcctgcataaagtcccgcacccaatctggatgatagccatgcaagcgaatgtcgccagtataggcgatttgcttatccggtgtcttaactaatagaccagtagcaccgtaagcgtcatgatcactaggatatatttccaggataatatcgcccaccttaattggtttcttgtattctgccgcgatgattggacgagtataagtccgatcatgacctgcagcaggaagcaagaagtcgcccttttcattcaaggctggcaataaatgagctgtaattggacctgcataaagtggaatttctggggccaaaaagttcattgccttactgtgatccaaatgtagatgcgaaatataggccgccgcatgctcccagcggtcagtatcaattggcttacccgttaatttaggatcgtaaaaattaggcacatccccgattaatttatttttaatcagagtttgataactttcatctggcaattttaactctggccgataaacttcccccaagtcaaacaatacatgcgatttgttataggccacttcaatcatcggtccaccaattgtggttaaaccattataaaaagttactgtcgttttatcctttaaggtcattgcgcactactcctcgaataatttgctttctaaagatgaagtacaaaatcaagattggcaaaacagtcaatgtggcagcagcaagttgaagttgagtttcactacctgcatcagatgcaaatgaagttaaaccattgttcaacaatctcatgctgtcttcgttagttaccaataatggccagaggaatgaattccaaccagaaatgaaacttaataaagcaacggtgaacaagccacctttagacattggcaccaaaattttccaaatatattcccaatcactcgctccgtcaatcatcgcagctttataaattgtctgtgagattgaaccgaagtagctttgcaagtagtacatgtagaaaattgaagttaaaaatggcaataccaaaccaatataagtgttcaacaagcccattctggcaatggtattgtagttagtaaagataattgcttcaccaggcaccatcaataatgataaaagtaccatttgaacaacacctttacccttgaacttcaagttaaccatggcaaaagcaccaagcaaggcgttaaacaaactcacaattgtcgttacactagctgtgataaaagtgtttaggaagtaacgagcaaatggagcttgggcgaatactttggcataatttgaccattcaaaatgcttaggaatgattgttggtggaatagtggttgtttctctaaaactcattaatccacccaaaatcatgtagataaatggaaagacagtaatgattgcgaaaatcgctaaaataatataagcaatcaaagtgccccaacgaatcttcttcatcctttactgtcctccaatcttcttcatcatcttgcgttgcaagaatgtgacaaacataatgatgataaataagacaaccgttgcggccatcgctacacctggagtaccaacaatttggaacttgttatagatgtagaacactgcagttgtggctgagttaccaacacctgcttgtccattgaataaggcataaacagatgtataaatcttaaatgcagcaatgatattcattgttaataagaaggcgatcgttggcacaagctgcggcattgtaatacgccagaacttttcagtaccagttgcgccatacatatccgcaattgtgtagtaattagggtcaatgtttctcaaagcccccatcaagataacgatgttaaaagctaaagaagtccaaacaccaaagatgataattgtcgtcaatgacatcgctggatcatcaatccagttcggtgttggtaagtgaaccgccttgagcaagaagttaagcaaaccatagtcaccgttaaaaatataacggaatacgataccaatagcgatagttgacgtaacatatggcataaagaaagtcgtttcaaagaatgacttatgctttatcctgctgaaaataaaccaggccaacatgattgaaatagccaaagcaactggcacagaaattagggcatacaaaatagtattcttgattgcccgccaaaattctggatcactaaagatatattgataattgctgaagccactccaatttagattaattaacgagccgctttgaaaactcattacaaaggcccgcaaaattggataaatactaaagaaagtaacaaagataattgttggcgctaaaaagagccacgcctttttctgattgctcttcattagtagacacgctctccttccttagtaaacaggaatactcgatcaagacgcatcttcaaattgatattatcaccaggcttaattggtgtctcaaggttgactaatgaacgagcttgtaccccatcatgggtaaacttcaaaattcgttcacgaccgattaattcgacatcatcaaccttagctgaaactgcaccatcttcttcgactggcaaaatattttctggacgaacggataaaacgtactcgccgtcagttaagtcacgtttaaaacgatccttgtctaaatcgtccacgttaatttcaaaatctgagccagtaatcttgccgccattaacctttacattaaagttatcaatcacaggattaccaacaaaattagcaacaaagtagttatttggttcaagatagaagttttgtcctaagtcatcttgttggatcacgccattattaaagagaataatcttatcaccgattgacaaggcttcttcttgatcgtgagtaacaaacaaggtggtaatacccacacttttaactaaagcacgaatttcttcacgaatcttcaaccgtaaacgtgcatccaagttactcaatggttcatccatcagcagaatcttaggttgttgcactaaagcacgagcaatagctacacgctgctgttgaccaccagataaattgcccggcttttgatcagcaagttcggtaatctgggtcgttgccatatatttttcagcaatcttcctcgcctcatccttaggcatcttttgcttgcccacagtcagaggaaacattacattctgaagtacagtcatatgtggatataaggcatagttctggaaaacatagccgatctgacgatccttaggtgctacgttaacaactgacttgccatcaaaaaggatgtcaccgctagttggattaagcaaaccagctagcatatttaagatggttgttttaccacaaccagatgggccaagcaaacatacaaggtcacctttttttacggaaaagctaacatccttgattgcttcatgaccgttatcataaacctttttaaggttctttacttccacgaatttctcatcattcataagtttcacgcaccactatatattgatttaaatttttaaatttttctattaattctaagctaaatatacgaaaataacaaataattttcatttgaaattcggggtttcaacgactttgtgaaatgcttctcagcaagtattcggcttttgttcgcatttgcttttatttttcacttatttctttttaaaaattcgggtttactaaatattgtggtaggtaccaaaaaagccatgaattagtcatggctttttgtatcataagttatctccacgttcaaattgatattttgaactattcaaggcttgacgaaccaacttgctcatcaagttcttagtctttttggtaatcacaccagcagtttcatcattagcgctagttaaatatttaataagctctctgccttccatatttttagctttttcatcaataagatcaattcggccaataccgtagctttgacaatcatcacgataggcgtttacctcataaatatattggtgatagcgtggttcaacaagcacttgtaaagttttatacaaccagtaagcactactatctgaattaaccatatgatctgccaccttatagttaagtggtgtatcctcaatattggtgtagaaaggaacatatggtgaatatgcataaaagcccatattaatccattgaattgcagccatcttggcaggaacatcatttctaatttgcaagatgcttgattcttggtttctgtctaaagcaatagaacggaacatcttttgttctttttctgaaccagatgaaaaagtgtccattggatcgtatggtgtaccgttatagtgactagttaaaaatctttgcacatcttcaacaccaatcttcttttcgggaacgcgcgtaaatggcatttcttgactagttgggtcttgttcaatgcttggattaaacaacttctgtccataccaagttcttggagtattgtaaaaagcatcagcttcatccttagtaccaaaaatatctctgaaagaaaagctaccgtcagtactattgtttaaatgattcttttctacgaattctcgaataccagctgaatacataaagttatctggatcatcaaagtcaacattttgaatcaccatgatgttaggacaaattgcgtaagaatcatcaggaacacgagccgcaacccattggtgacccgcgccagtttccagataccaaacttccttgttgtctgaaaaggcaataccgttgctttcaccggtaccatatttttcgattaattgccctaagcgcttaacaccttcacgagcagtcttcacgaatggcaaagtaatataaaccattgagtcttcgttgattccatttgctactaaaggatcatgtcctaagcagcgagcattagtagcttcagtttcagtggctgacatagcaacgttatattcgttaatgccttgctcgtcccagcgaccttctgaatcatcagcagtagggacagcagtccatttgcagccatcgccctcaaggtgcatcttaaagccgttatattttgatacataatcttcatcataatgacgggctgggtttaccacaaaaactttttcgttaatgccaccataaccgtcttcgtcacgcgcaatcatggttgatccatcgattgaagcgtccttaccaactagcattgcagtacagttatcttttttcattattgtttgtacttccttttttatttcagtaataatttttcatattattaattctactactcattaacctgcatttgccgatcaacttttgctcgaccgttattatagttaaaaacataaccgggctgcacgttatagagatagacattgaagtttaaactgccatcagttgaaacggcctgcaaattcacgccgcgggccattaactcattaccacgaaaaacagcagttgcttgataaattacacgcttattctgccgcagtgctctcctaaccttagcctcaaaaatagtctgaatcttttggttagaataagcagattgcgtaaacaaattcttaggattattttggtcccctgattgattgcgtggatcataattgccgctttgatcaattccagctgagactgaataggcaatcaagtggccccgattatagatttgggtaccgttacggtgattatagtgccagccagtcggttcaacatattgccttactcgcaagctatcattagccacattgcgcttttccaaaaaggctgtattagagcgcgatgttcgattcaatgaatcaaggttagagtaaatcacccgatttatcttccatgcgcctttgaccaaagtcgacttatcatggttgacttcggtataagcgcgactgccactcttaaaattcaaattagctaatttttgataatcagttggcgatagacctccataattggtcttggcttttgatgcatcgctaattgtattagttacatgttcatcattattgccagtaaagtcacgcaaaaactggctaccatttggatcgctgccagctttagtaaaaactccccataaaatcgcgattaagacaattaatgatgaaacaaccgttccttgtttttttcgtcttcttcgtgtcatctttttcctctaactacgagcccaatcatcaagcatgcttaagaaaaaggtctccgaaaaacgcttaatcttagcaccatttttgatcaaatcacgtgctgcattcaaatcctgattatcttttctaaagaaatcttgatcacccatgattaagtaattagtcgttgctaacactgaattgtcaacttggccgcccatattgttgatcatcttgcccgcttcagcttcgttcatatgaatattgccagacaaaacgatattcttattttgaaccggattgtgccaacctaagtcaacataatccaattcgccaatagttaggtcgatattcttaatcttgctttgtgccttttccaataaatcatcagtaaagtgctgggcaaagtcatcataaaccttgatcgtatcaagagaatcctgcaaaccgtggtgagcctcaacttgagcaattccagcccgctgcatgcagtcaagcagacggttatggcgctcgcgtggataatatgtccgcgccaaacgcaatacgtcaacgtaatcattatcaagcactggtaagccatatttttgacttaaatcatacaaaaagttcaagtcaaaattgacgttatacccaatgataacgtcatcaccaataaactcacgaaattcacgaatagcctgctcagccggaataccttccttcccaatttgctcttcagtaattccatttagcttagtaataaaagcaggaacagaattattcttggaaaacttcaccaaattagtatattgatcaacaatttgaccgttacgtaccttaaccccacctaattcagtaattcgatcgcggtaaggatataagcccgttgtttcaatatcaagcattgtataattggtcaaaaagtcaggcttttcctgtccttttttacgcaacttgtcttgcgcaccggtcacatgtaaaattccattttttatgtaaatactcattcttcacctatttaattatttaatcaaattcatcagcatctcgtgcgaattgctatcaaaacccattgctcgtttcttaagatcagctggcaaatctgcatcagctaaatcagcggcaatataatgccaattaggaaattgctgcactagctttaccattggatcaagtaattgaggactggtctcatctacgcctaattccaaaattacgacattcttgtcctcggctcccgttagaaaccaacgaaaacgcgtattagcatcggtatcagggaagaagttagcattcagcggcatatgcaattccattggactattgcagtcctcgcactttggtactaaatctgccgttacgttgccgttcttaattgccgtcataaagcgttctactacttcatggttatccttttgaccatgattaatcccgctagaacactgcattttagtccaatcaccaaaggcattgaaaattcgattttcattaaagcctgcattttcaaaaaagtgcccgaatgtactggtcgcaataaaatattttttatcacgaattagcttttttagagcaagcatcgtctcactaggctcatattgtaaggaatattcgttgattagctcactccaaaaagcccattgctcgctccaagtatcaaatctcttatctaatgcatccccaattgtatgcacatcatacttatctgcaattttgccaaattgatcatcaaagccttcttcacttaggatatctagttcctcttctttggccatgccattaccagccgttacgatcaccgtgttagcatttttcagccatttttttgctgtcactaaatctgccattttatctctttccctttgaataacctgtcaagcgtaattgtccattaatgtattctcctaagaaaacatcactgatactattataacctgcctcttcaacttgttgctgtaaccaagcttcgcttttgtgaatcaactctaagacatcaatattagcctgaccatcactaattattgggaaacgaatgttagcttcatcattttcaataatagttaattgcccgttttgctcaaagatacaattcttaatcttttcaacagagtagatacctcgactgcgcaatttaaacattaattcattagcggagattcctgctttcatacagttgccaactaacaccttgccatttttaattacttgaacaggtttaccatcgataatccctctaatccaattattgtgatcacggctgaatttcaaaataaaaacaaccaacgtccaaacaattagaactaggaaaaactgaagaattgtaatactaggattgtaaatcaagccaccaataattccacctaaaacataattctgcaactgatctaatgcagtcgtaggagccagattagacttaccaaagacattgatttgaatgattaaagttaagataccgagagcaaacttaatgaataattgtgtgtaatctagctgcattattttattacctctactttatgatcaattacatgggcttgcgttaatgtgtaagtattgcgatcatcattaaggtttaactgataatcaatatttttagaatcaatccttacgatcatgccattagttaaaaccgttgaactaactaaaacatcagaagtcgaaacattttcatctttagcaatcgatttgatgaatggcacgatttgaatcgcctgtgatttttgcgtattaagttgcacatatttttcatattgcgtaccggcaaacaaaagcaaaaataataaggcaataatacccaaatcgcgatacttggttgcaaaacggttatgtaaatatagcaaagcaaaaattatcattgctaacgccgagactgtcaagaagtttgtgtaaataatctctctcgttgattgacttttttatttatcttttaatcaaaataggattctagggtgtctcgaacttgcccaaatcctttatgaatcctgttaaagtaacggtcattgtaatccattgcctgaactccaataaaggtgtcaagcgactgctcagttggaaattctgttttaggcttggttttccgcttaagcctgttgttaaaggattcaatcatgttagttgagtaaattgaagctctaatagctggcggatagttgtaaaaggttaacagatcaggctcaacctgtctaagatctctaactacgtttttgtaggctttttcccagttttgatagaattcatgcagcacctgtacagccatttctttgtttgactgagtatgaatctgcttgaattcatccagtgctttttttcgatcgtcaacccgcattttggcactgatattacgcatgacgtgtaccaagcagcgttgaaaatgcgctttaggataggactggcagatagcctctttcatgccaactactccgtcagacaagaagagctctacctgttcaaggccgcgactcttgaagcctttgagcatttcgctccaaatctcaatattttcagtaggcgcaatacagtagtcaatcacttctttatgaccattaggtttgataccgatggcgatataaactgcttcgcgctcataagtgacccgcttaagaggaatataggtggcatcgagataaacgcagaagaacttatctgacagatgtcgctgatgatatgcctcaactttgggaatcatttctttagaaatattggaaaccatagctggagaataatagccgccatacattttctcaatcaaatcagcgatttctcgggttgtgacgcccttggaatagagcttgataacagtttgctctaaaacatcagtatgccttttataatctggcatagtgtgttgatgaaactcaacgtttctgtctctaggaactttgatttctatttgtccgaattgcgtatcaaccttgcggtaataagcaccatttctagagttgccagtattccagccatttctggcatagggatcatagcccagaaaggcagtcaattcagcttctagcaagttattaacagcctgttgtagttctttgcgcaataaatcatttattttgtctggattgaatagagcttgagcaaaatctttggtaaaatcattcatgaaggagttcttctttctgtatgtgttttttttgttcaaaccaatcatacgagaaaggaactcctttttctaatgtttaaagaaataaatttaaggaatcattcatccttacacaaactattttacagtctcctaacgccgccaccaacatcaaagcatataatactgcctgattagtattctggttattttgaatatatttcattgtataaaaggtcatgctctacctcacccttcatatttttctttcattctaacacagaaaaaaagtagcactttcgtactacttttactagaaattattcacttttcactattattaattatttttgaatttcttttaatccagctttgcgacggcccatgttaaaccatggtgaaacagtgaaggctaacacatcattaattacatagatcaatgaattaattgccatggctaagtttgcatcaccttgagcataagttacgcccaaaagaatcaactggaagacgccactagcagtccaccaaaagtattgattgttgtaacgcataaagcacatgatcccagcagttaatgaaatagcaaaactaatagcatcaatccaaggacgaggatcattggtaaatttaccaatcaaaaagccggatacaacataaacaagtaaagtaccaacaatagcaacaagccattcctttgaaccgaattttcttaagtgattcttagtgtcatcattccatgatctaacagcaataataactggtaaatctaaagttgcaatataagcaatctgttcaaaaatggaaagataattcttagctgaccaacctgcatagataaaacaagcagctgaaatcaaccccaaccaaccattaattgctttagtagcgttaattgccaatacacaaagtgtacccaaaagcgtaccaataaaagtaatcaaagttacgcttgtaattttgccttgaatcagcaaagctaattgaaatccaaacgcaaaaaaccataaacagtaattttgaactggccagcctttcaattgattaaatagccaaacaaaataattttcgtgttttctttccattgtactgagacgtaaaaagtagacaattaaaatattggattaatagaggcttgacttcgatactctttcggggttaagccttttaatctgctctttatcctttcgttgttatagtattcgatatattcctcgattgcttgagttaattcttgaagattatgatacttgtattcttgatcatagaacatttcagttttgagcaggccaaagaagttctccattagcccatcatccatggagttgccctttctggacatgctttgagtaataccatggagttttaaagctcgctgataacgagggctttgatactgacagccctgatcagtatgaaaaatgcagttattaagagctgtttctttggcaaaagccttgtcaagcattgtcattactaaatccatatctggatgtttggagatagtataagaaactatatcgccaccgcagccgtctagaataggcgataagtaaagcttttcattattaagatgaaattcagtgatatcagtataccattttgtgttaggcagggctgcgaagaaatcacgatgaattaaatttggagctattttgccaatagtacctttatagcttgaatatttgcgcttattgcgcctgatgcctttaagacctaatttatgcatccaatagcgaacggttttctccgtaactttccagccctctctgattaactgcaaagctactctgcgatatccatagcggccttgatgatgattaaaaatctcatggattctagcaataagctttgaccgtttaggcttgacgggctgtcgtttgataatcttgtagtatgagcttctggcaattataggtagctcagggtgctctgcaatcgcagctaatacataatttaaactaactttgaattcttgccttagatccgtaatcaccctagctatttcttctgatcttcttggtccaaggcacttagtttttttacgtattcgttcacaatacgcaatcgcaagttttcttctttcagctgctggatctctttctccagtttcttgcgagatttctgcttttctttggtcacgggcagggcgtcctttctgtttgataatgacattatacccgtttttcttatattctctaatccaattgttaagcatgccaatacttttaaaccccagttccaaagacagctgtaagtatggtttattgccaaagattgcttgttcaatagttcgctgcttaaactctttggaatagctttggtttttagtagttaaaatttctattccatgcatatcaattaatctaagcatatagtctaaattagctagattcattctgtacgctttagccaattgactgattgagatattttcatctttccatttatgataaatttctattttttgttctttattaaatttagacatagtaaacattctaagctaaatagtgaattagttatccgacgggataattgattcactatttttattcttttgtagaattaaagtagtggtaaaacgatatgccctgaggtctttagacacttgatgtcgcataataaactggcagttttacttaagttttcaatagtctcttcgaagaatgtggacactagatgtcgagtttagaaaattagatctgatttcttaagtaaatacgttttactactaagttttggaggtttttattatgcaagttacttttggaattgatgtaagcaagtctacttctactgtttgtgaactaattggtgaaagcaaaaatgaactaaccattactaataatcgtcctggttttattcaattgcttcatgaattaaccgctttttctaaacatccgcaaattatttttgaagctaccggtgtttattcacgcagactgcaggcttttcttgaagactacggctatgaatatgttgttattaatccgcttaaagccaaaaaagagatgaatatggggctacgctacaacaagaccgataaaactgatgcttatcatttagctttaattcaaagactttatcgccatccggttaatcaaagcgaatcccaaacttataagcagcttaatgctttgagccgcttctatgaccagctgacaagtgacttggtaatagctaaaaatcgacttcaccaagctctacaatcgacttttcctgaaattgaaaatttattttcttctgctaaaggtaaaaattactggcaaatagttgtgcgatatcctcattgtgacttagtaagaagagaagataaaaaacagcttattaactggttaatgagcttaaaggggattgcttttaaacacgctctaaggactgcagataaattaattgaattagcttatcaagcttatcaagttgtatcttgctctagcatagaagtcgagcaagtgcagtattatgcacacagattgcttaatttaagtgatcaaagagaaaatttaatcgcaagaatggttaagttagcgaagtctttgcctaatcatgatttagaaaacctagaaagcattccaggctttgcacagaccactgctgtcagagttttagcagagttaggagatttacgcagatttagtaatcctaataaaatcaatgcttttatcggaattgatccaggcagatatcagtcaggagaaatggactctaatttaagtattactaaacatggcaatgcagtcgcacgtaagttgctttatcgagctattggacaaattgataatgcagctaagacaaatccgtgtcatatagcagattattatgaaagcaaaaagctatcctctcaaaccaaagggttcaaaaagatagctattgcttcaattcataaactaatcagaaccatttatgccctgattatcaatgatcaaccatatgattacaacgtagccacacataatcaaaaagactttagtcgtaattaattgatcaagtacattataacgctaagcccaaaaatcagatatggatctgggcttatttgtcgtgtctaactaaaaaaataaatcgacactaaaagatgtttaagttgaaatttaaacaaaaaatgaagccaaacttcttattatgcttgactttacgtagaaaaagacctaaaagtgtctaacttttaggtctcagttcacatcctattcaacattccccttttttattttaggttgcaaaatacaagatcttgtgccttatccgtgctatgtaaaaaaaacatcgatatctagtatagtggaccattaattaaatacaagaattgacatttttaatttttgcgttaataacatatttctatttccgtttatcaagcaaacatttattaattttttctaaacagcaaaaaaattttgttccttttagtgacacagtgtcatatgatatatacgtgattattaatttatatttttatggaggtacactcatgtttaaaactaagaaaacgcaatttgctatccgaaaattagcacaaggcgcctcagcagttttactttgcttcggcatattgggcggagcaagtgcacctatcgttccagctgcaactacagatgacccaacaaaaacagtcactgaaagtacaattaatagtgagaatacttctttcaatattgaaaccaccaccaatgcatctgataaattcgcttccatcagcaaaaatggggggtacaacggtagtgccaaattctgctgagccagtttctccggatcagtccattacagaaaatgataatcagcaagaaaaaactactgtagagaattctactgagatatctgagcctgtcaaagacatcaataagtttgataatgatgccaatgttgataaagacgaaacaatcactgtaaaaaagccaacaattaatgtcgacactgaaaaggtagaacaaggcgatgaaacagagaaaagtaaactcgaagaaattaaaaagtatattgaggacgtagccgcaaaacatccattaggcattgccggaattttccacctttttggtaacgaaatagatggatctgctcatattgcaggaaatgtcgcaacagacaaattaagtgctggcaacttcggtactatccaagatgccactagtaacttgactacttgtgatattcattacatcggcagtattgatcatttgaatcagattgatggcgaaaataaactagttatttttggtccagatgttgaatataaatcatacgaaaatggtagttccattcaggtaaaaataaatggaaattggcaaaaagtaggaattccatacaacaaaactatcagagctgaccaaattctagatattcaaggcgaactagataaattaagcgataaatcagacgaatgggctaagcaaacgcaaaccgaaggcgtaattgctgatttcaaggagggtaaatagttggatcgacgtttctaatgctatcaaggatggcagcaaagatcctatttatgtaactattgatgcaaaatacctttcaggcaataacaagcatgaaattgctattaaaggcatccctgcagacgcagaaacaccaatcatcatcctaaatgtaactaatgttcaaaatggcgatttaaccgttagcacaagacttgttttggattattcagaccaaactagcatcaatggcgtaagtgaaaaaccatctcaacttaataagttattatggaattttggaacagatgttaaaaatttaactattgaaggagacttccatttaggtagtattttagctactaacgcacatattaccgctaacaaaaatgttgacggtaatatcattggtaacaaaatcactattaaaggtgaaactcaccgttgggacctaactccgccattagtagaagttgaaactccgccggaggatccaaaagatccacctaaagaccccgaaaagccagagaatccacctaaggatcctgaacctactcctgagcctgaaccggaactaaagcctgagcctactcctgatcctgaagaagagagtactcccccattaccagaagaagtaatttctccaactgataatgaaaattcctctgacttcaaggaagaggacactgctcctctaccagaatctgttgtagaaaaacaagttaaaaagaatcttccatccccttcaactactgaagaaaatattgcacctcatgctgcgactatcccaacctcaactataactgaaaaagaaacagttttacctcaaaccggtgaaagccaagacaagctaatgacgattggactcatcactactagcgttgcttcattgtttgcagtattaggcacagtaatcaaaaaaagaaattaattaaaaatgattcaattcaagccatttttattcttaaaataatctagaattaagtgaggattaaaccatgttaaaaaatagactaaaaatattccaacaaattcttcctactaaggcaactaacactccaaaataccaattgcctatcaactattacgatcctgaaggcagcatggttggcacttattctggaattaacttggcggcaaatgaaactatcactcaccaccagctcaaaagatttatcaacatccatcttcccgaaaactacgaagtttttccttactttgcttatcctaaggagaatatcacctgtgaaaatctgcctgatgaaataatgatcacaatcagattatctaattaaaaaaggcgactcgattgagtcgcttttttcattgcaattgatattaatgttgcgaagcaccagttgtagtatctggttcttcgtgcttttcttctttaacttctgcagccttagttgaagcaccagttgcggcgtctggatcagaatttctacggtaagttgcaccagtagttgcatcatcatctactaccaatttttgaccagtagtctcacagaagtacttaactaatggatataagtctttgacccattcataaataccagcatagttaccttggtcgtcttctacacgcttataatagtccacaaccaacttcttcaaattgcctgttggtattggcatataaacaacatcatgacctgcttccttagtccgcaaagcatgaacaacttttttaacattcggaataacgtcacgaacatctgggtgaactgcgcgcatcgtatcacccacttgatctggcgtagctagcattttcttgttaggatcagttggacggttataccacaagaattggttattatcatcaacaaatgtcattttaccaatggtatttctcagcatccaattaagttggttaacagttaacagacctgcatcaagtttgacataatcgtcaccctccgcagcatgaacttttttagctgctttatctagccaatcaggatcatttttatcgattccctcaactgtatacttagacttaccctttgcatcgaaatcttcttttaagtattcatcggcattcatatctttaagccattttggttcagccatagtaagaccccctcgtatgaactttgttaatctaattatataatgtaagtggtttcaattcaacaattttaatatattttatataatatttttactagctggattatatattattttacgcgtggtgctagttaaatctttctagacaataagccaaattataagctaaaattgcaatttccaaccggctttgaaagcctatcagactacgtgctcgattgttctcggcattgtaataggtcagaagcgaaaagtcgctttcaattgttctgcgaatagccatcaattgatgatcattgtgctttttagctcctgtcatatttttacgatatggtgtccaaagttcataacccatttgttttagctgttgatgcagttctttgcctaaatagccttcgtcgccaagaagatagtaattagatggatgggtattttccagcagttcaactgtctccctggcatcatgaactgatgcttttgttacgacataatcaagaatgtaaccgtcatcgctaacaatgacatgaactttgaaaccatagaagtaaattttcttggtggccttataaccaatgttggcataaccgcgaaaaattttagcacgatagttgcgaattggttggcaaacaggtaccggaaagctgtcaatgatcaagaaatgtccattcaggtcaacctttttattcatttcttgccgtatctgataaatcaattgcaatagctgacgtgaacgccgattaaaacgtgagtgtgataaacaattgaaacattcacagaatcttctttgtgattcaattcctgtcttagcttgccagataagtaaagccaaaatcagactgtccgtagttttaatttgatcaatatttcgccgatgagtaaactcagccggtgcatacaaacgataccagtgccgacaaattatcactaaatctttaaaactaacttgtaaatggtggctaaaacgcttaagcttaaggcagttcaatcagatcagactcttttctattattactatttacaagtcgagtctaacaagattggacttttttattaactaaaacgatttaactagcaccctgcgtattattttatataaaaaaagctgatcaacgagcaactctttacatctttgtctcaattgtatgagtgtccaaatgaatgatcacgtcaaacatcgctttttcttctggtgaaatcttatgagccacctcaataacagcaatacgtggattcttcaacagcgtcttatgaatgcctaacgacaagttcgggtcaagcgcacttgtcgcttcatcagccagcaaaatcggccgatctgataaaagcgcgcgagcaatttctactctttgaatttgtccacccgacaagccactgccgttttcacctacagccttgtctagaccctgttcctttaccaattcatctagaccagcctcatgaataacttctttcaaatgctcgtcactcactttacgtcctaacgtaatgttgaaacgcaacgtatcatcaaacatgaatggcttttggttaacataggaaaaataattatgggcagcatcccaatttcccgttacatccgtaccattgatcaaaattttaccgtctttgggctttctcaaacctaatagcaagcgaagcaaggtggtcttgccccaaccacttggcgccatcaatagaactttttcacccggcttaactgttaagttcacattctcaaagatgcgtttgtgatcactacctgtaacataagataattgttcaacctccataccatcaaaatgatcgatcttctgcttatcatctttcagcacgtgatgcaaagcgcgctgggtcttttcccacattggcacagtcgacttgacttggttaaattcgttaaaaagagtcacgattggcgtgataaagttcaaggccaaatcgaccatcattactaatgtacccacctttaaatttccctgcagcatcataataccgccaatagtacatggtacgatgaagcaaaacaattcagcagctgaataaattaattctagtgcccaagcttgagtcaacgtcatattacgcagagcgttctccattgcctgggccgcaccagctgctcgtgtaacgatgttggtgcgcacgttataaagcttggtagcctgtgccccatttaatgaatcggacacattttgcgtatagttagcgttagtcgttgcccaaatcttggacttacgtgtaatgataggactagtaatcatttgaactaatgctggcgcaagcgtagcaatcaaaaatactagggtcatctgccatgaactataaaaagcaaaagtaattgccccgaaaaacgacaaaccttggaaaatcatatccaattgtgccgttatccgattagtttcaatctgttttaaatcgttggtcatcagtgataaaccgctcttgatatcaggctcaccttgatcaaccaaataacgcaagttagtgcgcttaaaggtcatattcacgtcacgaataatgcccatctttaccgtttcatagacaaagttactggccataaaacacatctgacctaaggcagtcaaagcagccaggcgaatcaaatgcagataatcatgcgatcctgacgaagcaacattcaacataatttgtaccatataagctacaaagacgatgttgcaggccttgattgcggccaaaatggtatagctaataatttggctttttttagcgtacttcaggctcattaatttctccttttctatcccgttagaaacattatacccgctagcttgtctttttctcaattagatacgataattagagtaatcattttaatttttaatgaaaagcagaaaggaacttttaatgaagactggtactaaaattattactttagacaacggttatcacttatggaccaacacccaaggtgaaggcgacattcatcttctagctttgcatggtggtcctggcggcaatcacgaatattgggaagacactgcagaacaattgaaaaagcaaggcttgaacgtgcaagttactatgtacgatcaactcggttcactttattcagatcagcctgactactctgatcctgaaattgccaagaaatatttaacctacgaatatttcttagatgaggttgacgaagtccgtgaaaagttaggacttgataacatttatttaatcggccaaagctggggtggcctattagttcaagaatacgccgttaaatatggtcaacacttgaaaggtgcaattatctcctcaatggttgatgaaatcgatgagtacgttgcttcagttaacagaagacgccaagaggttttaccacaaaccgaaatcgacttcatgcacgaatgcgaaaagaacaacgactatgataatcaacgctatcaagatgacgtacaaattttaaacattaatttcgttgaccgaaagcaaccatctaagctttaccacttaaaagacattggtggaaccgctgtttacaatgctttccaaggcgacaatgaattcgtaattactggtaaattaaaagactggcatttcagagatcaattacacaagatcaaggtgccaaccctattaacctttggtgaaaacgaaactatgccaatttcaactgctaagattatgcaaaagaagatccctaactcacgcttagtaactacacctgacggtggtcaccaccacatggttgacaaccctgacgtatattataagcacttagctgactttattcgtgaagtagaaaatggtacatttaagggcgaaaattaattaacagatattcaggctggaatcgatttccggccttttatttttaaggaaaatgatatggatgaaaaagatgtcaaaattctgctagttgaggatgaagaaagcgtcgctagcttcgtcaaaactgaattagaatttgaggattaccaagttgtttgggctgaagacggcaaaaaagcattagacctttttactcaagaaaagccaactttaattttgcttgattggatgttgccagtatatgatggcatgaccgtgttacggcgaatccgcaagcaaagtgatgtccctattattatgcttaccgccaaaaattctgcctctgatataagctctgctcttgatcagggactagacgactacctcaccaaaccatttgaaatcgaggaattgctggcacgaattcgggtagtcttgcgaagactggaaaaaatgcggcagcaaaatgacgtccctgatacttccctagaatttggcccattaaaaattgatctgcttaagcacgaattttactgtgacaccgagcaaatttatcttactcctaaggaatttgccttaatcactgaactaatgcgggaccccgaaaaagtcaaaagtcgtgacgagttgcttgatacagtctggggatatgactttgttggtcaaaccaatactgttgatgtttatattcgaactattcgcaacaagataggcaatccctacaaaaagatcattaaaaccatgcgcggcttgggctattgtttgagaaaattagatgataatcatgaaaaaagctgatcctcaaacaactacgcaacaattaacccgtttattcgttaggctatttgtcgctattttaattctggtcaatttggcttttctaattatttcatcggcctatatttattaccaagctgaacggcaaagtgaacaagttgttgaagcagtaaaagaaaatcttgattcaaaatatgactggtcggctatgctggatgcttatttggcaaaacaagacgatgatgccatcattttaaccacccctcaaggcaaaagttattactctgaaaatgctcacgagacctttaaacaaattaatcgccaaaatcattatcaaaacatggtctattccaataagcatatttacttcttacggacggaaaactcgcatgactttaaaatcaaggttgcattaaacattgatcgcttatttcatttaattatttggctatttgggacaatgattgtcatcaacttaatcgctattctgctgagcatcccccttattcgccgttttgcccacaaatggagtcgttcaattcaggtaatgaataatgaaattcaagaaatccagcaaggtgcttcaactgagcaaatcacagtgccgcaacaaccattagagattcgaaaattagcccagtcttttaacaatctgctagcttttcaaaaacaggccttacagcgtgagcaacaattcgtcagtgatgcttcacatgaactcaaaacaccaatcgccgcaattcgaggacacgttaatttaatcagacgccatggtcaagccaaaccagaaatcatccctaagtcactggattatatcgatactgaatcaaaaaagatggaaatattagtcaacgatttactcaccttaggaagaatcgaacgcaatactgaagtcgtcaaaattgatttggtaagaattattaatgaagtagtgtcagaaatacagtcagtttatccacaaaaaatacagactgacatgccacaagtattgaaatatcgtattaattcactagattttcacaacattgtgcacaacttagtggaaaatgcggcaaaatattctcctcaagacagcactattgtagttaaattagctaaaaataaaggacaggtctctttcacagttgcagacaacggaatgggcattgcgccagaaaatcgcgagaagatctttcaacgttttttccgtgaagacacgtcccactccaataaagttaaaggatctggcctagggttagcaattgtcaaagctgaagctgataagtatcatggtcaaattaaagttacggataatagtcctcagggaacaatttttacagtttcttttcctacagaaaaatgaagaaatcttcatttaaactctattaaatcttagttttttaaagctgcttagctagtaagataaatatatcaagttaaagcaaaacaaaaaattatcaatagtttaaaggagaacatattatgaagactattaacttaaagaaaattactattactggcgtagcattactcggcttaggaactgctgcaattaccgcaactaatttagctactgaacctaacgtggttcaagctgcttcaagcaaaattaaggtttcacaaaattcagctgttaaaaagtttaaggcaaaattcaaggcagctaaagtcgaatcaatcagcttagataaagaaaaaggccgttacgtttacgagatcgaaggcttcaattcaacgagagaatacgaaatgaaaattaatgccgcaactggcaaagttatctcatcccactccgaaagacttgatcgagacgagcgtaataaaaaagcattaaatttcagcaaaactatttctcgctcaactgctactaaaattgctcaaaaaagagtatctggcaaggcagttgaatggtcattagatcgtgaaggttcaaagaatgtttgggaagttaccatcagcaagaacggccaaaagagcgaagtaaaaattaacgcaattactaaaaaagtaatcagtgttgaacgggactaattgagaaaagaaggtatagaatagatgaaatttactaaactgacaagtattgcattattaagcgcagctttattaacaggaactgtagcatgttcaaaacaagataattcaactgctaaaactactacccaaaagagtgttacttcatcaaaggttacacataattctgaatcagcaatgagcaaacaaactcaaaaagataatattcaaatcaaattaagccagcaagaagccattgataaattccatcaacaatttagtggcaaacagcttaaaagcattgaattaaatcgtgaaggcaaacattacctttatgaaattgaaggattcgattcaaacaatgaatattctgttaacatcaacgcagaaactggtcaaattggacatgttcattcagaaaagttagatcatgatgatcgaaaccaaaaagctctagatttcaagggcaccattagccgcgacgatgctagtcgtatcgcagaagagcacattaaaggcactagcgaagaatggaaactagagcaagacgaagacactggtaaaacatactgggaagttaaggttaaaaatggtcatcaagaaaccgaagttaaaattaacgctcacaccaaagaagttatttcaactgaacatgatgattaataagattaagaacataaagaaagccgcaacattattctcgaagttgcggctttttattttgtctaatttttggataacttttttaccaataaccaatcagtttgaggatcgctaccaacttggaaagtatgctggctcactttttcaaatccatgacgcttataaaaatattgtgccggaatgttcttttcataaacgcctaaccacatgtaatctttgccttcttctcgtgctgtcttttctgcaaaatcaaacaaaacattgcccaacccgcgatgttgaaaattagtacgcagataaattcgttccacttctagagcattatcacgtaactgctcagtctgagcatccccaacattgatttttaaataaccagcaatttttcctttaaccattaaaaagtaaaaacgactattaggattttcaatctctctaatcaacttttccgtctgataatcttcctctaaaaagcgtttcatgtcatctggtgcagtataaggatcaaaagtcgttttaaaagtttcacgtgaaactttctgtaattctttcacatccgctgttgtaattgctttaatctcgtacttcatcaatatttcctctttccaccgttcttaaccaggtgccaattttcactggcattcttttctacaatttgtaacaaagcagctaattctgttctctgtttttgatctagtcctgtcaaaactatttcatttgaataagcattttctttttctattcgagcagctaatttatctcctaattctgtcacaaacaaatgcttaatctttttattctgctggtcattttctttcctaatcagctgattttgttccagttttttaatgctacgagctgccgtcgtccgatcaacattaagcatccctgctagatggtcagaaataattcccggattttctttaatgcgggctaaatacaggtactgacctcgattcaattgcatctctttaaattcaatattagcaatcgaatcaagtgctcgcgcaatagtgccaatttgacgcaaaatatcttctttcatgtttttcacctaaaaactattatatttaattttgttgtaattgcaacaataaaatataaaaactaaaaaagggatcgctccctttagttaattcatcaatttttctttagttcatttagatcgactacctgatcagctaactgcttaacttcatctcttaagtggtgagttaccataattacggttttatctttttgcgtcaaaatcaatctttctaattgtacgctagaagctttgtctaaggcagaagtagcttcatctaacagataaattggtgtatcacgcagcaatgcacgtgcaaaagcaacacgctgtttttgcccaccggacaactgtttaccttggtcagctaaaacagtatccatgccatcaggcaacttagcaattagatcctctaatccacattctttgatcacttcagaaatttttgcttttgaaacttggcgtcccaaagttaaattccaccctagagaagcagtaaaaatatatggatcttgctgcaaatatgtaatctgatcatgcaaatccttatctgaaatctggttatattccacatcagaaatttcaattttcccctgataatctctaagtaagccagaaatcaaattcagcagagtcccccatcagaatatatttacttttcagtttaaaatttaaattcaaattctcaaagataggcttatcttgtccagaatactgataagaaactttatccaattctagattgcttagtttaaaatcagcaggcaaagctccatcaacagttttaagcggtatagtcttaaatttttctataattggtttaactgatttgaattcttgccaattaaaactaatcccacttaattcagcgaaaattgtactggcaaaaaattgtgccccactgatggtcccgactggcgttaattgatgcaaaatcaaccagcctgtttgccctaaaatgataacttgactgataaaggctagaccattggtaatcgcctgagttatcccggctgttttactataatttagcgcatgttttttaacatcatcagaagcgccattgatctttttgacgattgtttgcggtaaattggcaagaaataaggtattgaagccattcaacacatcattaattgaattaaccaaacgttcattggcatgggtatattctaatgaccttttggccaaaattttagaaaacaaattgggaaccactcccataataattgtcaaaataatcacagtgaccacaagactgacattgaagtacgccaaagtgagcataccgaaaacaatttcactgatttgtctaatgatcatcatgaaatcctcgacaccaaagttattaatggttgtaatgtcattggtcagccaagaattgtaagtagctaccgtttgttgatgaaagcctgaataactcgtctgtgatagatcttgcgcaatgtcatttctaattaatttatccacattttgtgccaaacgggtttgctcaacattgactagacagttaacaatcgcgtaaaaaatataggcaccgcccattaaggcaacccacatgaaaaaacgctcagcttttaattttgcaactgcacttaaagcattagcgctagatattccggctagtgtcaaaaagcctgcattaatgactattaaaaatgtaacaaataaaaattcccactttaatcttttaaaatattgcagtaattccattgattctccttatattaaaaataattaaattaataatactatatttatgtatttgttcaatattttttaatactttacttaaattactgcaaaattaaaagggatcgctcccttttaattagtctacataagcatatttatatgaccattgcgtaccagcagtattatgaatgatgccgtgaactcgcttgttttgcaagtaagctgtggtctgttgataaatcggtgtaatagcctgattactatttacaatcttagctgccgaaatcagatcattccagcgtatgtcaggattattggcgtcttgattgccagcttttttaaccaaattatcgtactcagaatttgaccacttaccgtaattgtaagacgtacctgtcattggaatttgcataaatgtcatcgggtcgttgaagtcgccaccccaatgagagagataaatgtcaaagttgccttgatgtgctcgactggtggttgacttatcaggaatattggtaatatttatcttgattcccttcaattctttggtccattgtgactgcaaatattgggtcaattgatcactgtctgcttcatcatttgaagataaaacatcaaaagtcaaactcttttggccaatctcctgtaatcccttttgccaatatttcttggctagagctggattataatcaactgtatttttcactgcttgttctttagcaaaatctatacctgttttaggatttgcagccaaatcattggcaacaaagccttttggcagagttgagccattgcctaaaacctttttagtcacaatatcacgatcaattgataatgataaagccaagcgaatatttttattattcaaggcctttctattaactgcatttttatccttaaaattataaagcaagaaacgcactaacgaatatggatattgagtaaagtcattattgctcttcaagtttttaacttgctcacttgaaagtggagttaaatccaatttgccctgttgatacaactgataaccagtattgttagacttaactacttgatagtgaatcttgttcaacttgactaccttcttgtcccagtaatcattattcttaacaaatgaccaggtatcattagttccattccatcctttaatcttgaaaggacctgagtagacttggtactgagccttggttgcgtatctattgccatactttttcacaactttttcgttttgcggcccaaatagtggataagccatcaatactctaaagtaagcgatcgggcgatttaacttaaccactaccgtctttttatccggtgcagaaattcctaatgcattaggtgatttctttcctgcaatgattgcgtcagcattcttcacgccactaaaaagataggcatacggagaagcggtcttaggattcaagcttcttttccaagaataaacaaagtcctgcgctacaatcggatcaccattggaccacttagaatcacgtatcttaaacgtccaggtcttaccatctttagatacggtcccagttttagctaagccggctgttggcttaccatttttaccaagacgataaaaactttcgaatacattgccagtttgaccaaatccggtagacttactgatatcaatagtatctagtggagctgtggtgcttaaatttaaagtgccactttgagctgccgacttactactgctattgccattaccacatgctgcaagaagcattcctaatgaaatagtaacgactcctgctaaaactccctttagtttcgacataaattttcctttctcaaacaaaaaaatgggatgtactccaacacggaatacatcccattaagaaccacaactttttaactagttaatcagtaatagtcttaagatgaatcaccacatcagagcatgtcaaataaatgctgtttgtacaacaacattcagtgtattgacattgcatttgacgcttaaacatgtgattcatcatccttcttacttttgataagaataatcataatttattcgatcacgattgtcaacaaaaatctattgtataattatagaaaaatatttggagaaatttttatggaaattataaaatatggtccttacactcttttcacacttattagaacaatcctaacatttatcgtggctattgagcatatcggtatctgtttcttagaaatgtttggtaaacctgaacaacaagctaaggcttttgacatggatatcaattttgttaaacaagaagctgctcaagtttcactagctaaccaaggcatctacaatggtatgttaggtgtaattttgatcattgctttctttattttccctatccctattctttttaacgtatggaaattaattctaagtttaattgtcgtagtagcaatttacggcggattcactgcaactaagaaaatctttttagtacaaatgctacccgcacttttagcattaatttttcttttcatttaaaaatattgcatttttgtagcaaaaaacataagaaaattcaaagctcctagtgataagctgtcaccttgtgattatgtaatatataatatcagtaaacatatagaacataataacgaggtggaattcatgagaaaattttttatcattatcagcagcattattactgggttacttattgggataattggggcaacgatctatctaaatagtcaatcgtcaaaggtaagtaactttaccattcgaactactaatttaacagctcaaccgaaaatgatcagctattctagcaataacctgccacagattaatctctcacaggattccgccgttcagaaattcaaatcattatatacacatgcagtaggtcaactaccttagactgaagtctagggtttagtggcttgttagcttgcgctaaccagaacaccaacttgcttagatacggatttgacttaccagcagtaatcttttgactattgccgatagaggtcgtctaattaccaaagccttttaagtccgcgagttgctagcggactgcagcttttctaggctgcttcttttattttaggattctgccacttgcctaatcctttttctaagatgttcacggccgcattccaatcacgaatatgatgcatctgacagattgggcaagtccattcccgatccttaagggttaatttcttataaccgttttggcccataatactgccacattgatggcatctttgggtggtgtacttaggatcaattgttagaaattctttgccatatagatatgccttataagccagcatgttcaggaaactacgccaaccaacatcagaaatagcttgagacaaggcatgattcttaagcaggtttttgctccttaattcctcggcaactactaaatcgtggtttttgattaatgcagttgagagaacttgtaagaagtcttcacgctgtctgcgaatcttgtcgtgcagtctggcaactgataagcgctgcttttgatagttttttgctagccgcaaattgcgtccttcttttttagcccggcgctgcctgcgagataatactcgttgagcacgagccagcttctttttggctttgcggtaaaagcgtggattagcgaccattgatccatttgaatccgttaagaaattatcaaggttgagatctattccaagttgactctgcgtcttaggcaaggctttaacaaaggcaatatcgctgcctaactgcattgataagtagaattgctcgtcagcggtcttttttatcgtcactgtcccaattctagttgagatatgattaagcaagcgctctttaatcagttttctaaaaccagcaatgcggacaacgcctagcttaggcaatttaatatgcttagcatcaataaacctagctgtcccgttatcaagaaaagcttctggctgcttaggatattgacagttggtctgatatgaccagtcgctgcgttttttatggaaagttgggattccatgaccaatcttacgatagttgttccaagccttctgataattttgaatggcattggcaagagcgaggctatcaatttctttaacacgcaaaaagctataagtatcgcggatattctttggcttagccaatagttcgctattagtgactacttcttctgccaacctagtctcataattattaagaatagaaaaggcaaaaggcattgcttgatattgtctaacagctaagtagcccttagcatgataattacttcgattacgtcctacataagagttgtagacaaagcgctgcgcatcatagtttagcttaatgattttcttttgcttagaactaggataaaagcgaagcttaacgccaaaatgataggctaaactgctcatttttttcatgtgtttcacctcctcgtattatataaattgtaattagtcatattgtgataattaatcaaattagtatttgctttttgatcttcacatgttagcctctaattgtcattggctttggtcaactggtctaggttatcacctcctgcagttttgtctgctttataagtctgccacccagacagttcctttatgctctaactcacatgctgtattgattgcttctttttgctagtccttgagcaattgggattaggtgcagctttcaaagaagcaaccagtgaatacttatactggcgagattgaacttaagaactgtaattaggggttaacatgtgaagatcaaaatctatgatcagaaatttgaaagaaaggaggccatttccaatgaaattatttgtcggtattgatgttagttctaaagatttacaggtcgttgcacttgattcagaagatcaaaacaaacgcttaattaacgatagctttgtcaatgatctttatggtgctagtgaactgaaaaaacaaattttagatctagctcaaaataaacactatgatcaaatcattattggcatggaagctacatctatttacagttttcatcctgcttactttttccaaaatgacgaagatttacaaaagctcaatgtagagactgatgtaattaaccccaaagaaaccagcaggtttcataaagtctttgaagaaagtaaaactgatcctctcgatgcttattacattgctttgtatctaagctttggacattatcgagtaagcattgccagacaagacaactatcttgctttagagcgtttaacgcgtaccagatatgaattagttcaagaactgactcgtaccaaacagcacttcattgaagctttatattatcgggttaataaactaatcactgtcgataaagataagattaatactcctcttttcggtgctacaatgatgtctattgtaaccgatagtaaaactctggatgagatcgcggatatgcctaccgaagacttaatttcttacttacaggttaaaggcagaggacgcttttccgatccagataccttggctaaagcaattaagaaagctgttagaggttcatatcgcttaggcaaagtaatgactgattcaattgatgcagtgctttctgttcattacaacatgattcaaagctttaatgaatctattaaagatctagaaaaagcaattgatcgtatcgttgatgcattaccagaaagcaaaattctggaatcaattcccggtattggcaaaacctatacagctggtattatcgctgagatcggaagtatcgatcgctttgataaagaagaacagctggctaagtatgccggcctaacctggaatcaatatcaatcgggagatcacagcaacgaacatactccaatggccaggactggaaacagatatctaagatattacttgattgaagctgccaatctagcaagattacatgatcctgttttcaaaaaatattaccaaaagaagtatgatgaagctgtctactcgccgcataaacgtgcttgcacattaactgcaagaaaattagtacgagttatctttaaattgctcaaagatgacaaactgtacaggacaccgaggtcttaatttcaaaaattggtctaaatttaaaagtaaacaaaagtttaacattaaaaaaatcaacctttaccaaggcttagtttcatatactcaaatttatgatcaaaaagaacaaatatcatcgcctttcatttgacttattaccacatgactcatagattagatatttatattttacagggaagtcgaacatatgtctctattttttaataaaaaagctgactgctaggtcagcttggtcctatccatccccacattaaaatacggggattttcgggcgtttttcattaaatcgatcacacttagtttaagtaaagatatctatgtttatgacatagtaggctatgatgaccgtaaagactgtactattcaagttgacgcaactaataacaagattctaggtcagtctacgcaggtgcttgattatgactacgaaaaagatgcgtctttgaacctaaaaaagacaatttcacgccaagaagctaatgaaattgccctaaaagaattcagtggaggaacaccgatttcatgggaattaactgatgacaataatcaatcaatttgggaagttaaaatgatccacggtaaacacaaacataccgtaaaaattaatgctagaacaaaggctgtaatctaaaataatccccaacttatgcacaagttgaggattattttcttatcttttatctaggttgactatctgcacgtgacttgtaatcaccgttttcagtaccaataattagcttttcgccattcttgataaaatcaggaacttgcacaactaagccagtttccatagtagcaggtttaccaccaccagctacagttgcacccttaatctctggttgtgtttccttaacggtcatttcaacagttgatggcaattcaataccgataatcttgttatcatctgtaaagtccatatcaaccataatgttaggcatcaagaacttaacgtcatcacccaattgatcagctgaaacttcatattgatcataagtatcagtatccatgaaagtataagtattaccttcgccgtaaaggtattgagcctttttcttagttacttcaactaaatccactttttcagttggacgcatggtcttgtggacaactgcaccactcttaacgtcacgcaaatccatttgcataacggtattacccttacctggcttatggtggttagcctttaaaactttgatcaatttgccatcttggctaaaaatcataccttttttcaaattaattgcttgtaccattatttcttctccctttaatttaaacttacctttcgactagtttaaacacgctggaggcaaagcaaatttttttatcaacagtaaataaatcgtattcataatacctagtataccaaattagatgtgccgcaggtatatccgatcaatcaaatgtccgtcagtcttatgcaaaatcaggctagcacgttccttggttggcgcaatatattcacgcaagttgaccagattaaccatctgccaggtttcttcagccaattgaattgcatcttccagcggtccattagccattttatagtaaaaattatctggcttatttttatttaatttaagtacttttctaaagcgttgcatgtaccatttttcaatcaaatcttcttcagcgtcaatataaattgaaaaatcgaaaaagtcactagtcacaacttgtccactctcgggcaattgcaatgtattaattccttcaataatcaatacatcaggattttttacatgaccatatttcccaggtactatatcgcttaattcttgagaatatagtggataaacgatatccttctttccacttaaaacgtctcgtaaaaaatcactgagcaaagtcatattgtaactttcaggaaagcctttgcgaggcattaaattacgccgctttaattcctcattagggtaaataaaaccatccgtggtcatcaagtgtacctttaattctggataggttctactgagcaacaattgtaataaacgcgcagtggttgatttgccaaccgcaaccgaacccgaaataccgatgataaacggagctggtgaaaaacttttatgcaaaaatttgatttgtgctttttgcgcattctttttttgttggtaaactaagtgtaagtaactgatcaaactggtatagatctcatgcacgtcggttaggtcaatcacgtctcctaaagacttgatatcagctaattcttctttggtaatattgactttatctaagggagctaatttagcccattcatttctgttaaaactcgtataatttctcatatatcgtatccatattccttctaaaacactaacttattataatagaaagcgctaaaaatatgaaaaaaataatcctattcggcgattccatttttaacggatatcgtaatggtcaaaatacaaacctagtaactaatttatttcaacaggcactaattaattatgcacaggtggaaaacatttctaaaagcggtgctaccacagttgaaggcgtcgattatttggagcaaattcccccagaacatgatctagttgttgttgaatacggcaataacgatgccgcaacagcttggggcattagtccagaaagctacgaaaagaacttggctcaaatccttagtgcagtaggcaaagccattgttgtgggattgtgcaatcccaatccagaaagtgacatttttcaatattatggtgctgaaagactcgatctttttaacaatatcgcccaaaaagtcgcaaaggcacatggtgcacaatttgtggatattttacctgcaatgagaaacttaaaagacaaatcgacatattatcaagccgacgggcaacatttaactgatcaaggaaatgagtttttagttaatcaaatcgtgccagtaatcaaaaaagacttagcctaagccaagtccctcttcatcatcacatgttctacgccgccttcatcaaacggttcgcctacaacttgatagcccaagctatcatagaaaagctttacccgcatttgggcgtgacagtaaactgcatcaatcttattttgccgtaaaaatttatgcacagctgtaatcattttcgatcctagctgttgtccgcgcgcttcttttgacacagcaacgcgtcctagcatccatttaccatcttcttgaaacagacgacaagtcgctaaggcagtcgtctgtttttgattgagtaaataaacctgaacagcaattaggtcctcatcatctaaatctggtagagttatcttctgttcagccacaaaagtcgtgttgcgcaatctttctacgcaatagaattctctagctgtcatttcatcaatctttttaaaaataaaattatctatcttcatattacttgcctaaccaactattgtttctgccaaaccatttttcattaagtttacgcaattgaccatttttttgcaattttgctaaaccttgattgaccttctgacgcaaagttttgtctcccttacgcatccccacagcgaacaagtccattggcacgcgatcattctgaattaccttgtattcgctacttttagccatgtgagcaatataatagtcggcataaacttcatctaacagaattccttgaattcgtcctgcattcagatccaagaacgaattagaaatcgtatcatataaaactgttttcttagcatgcagcacatcttgtttagtttcataccactgctctgctgttgaaccagtttgcattcctaattcataattcttcatttgtttaaatgaactaatgtcactatcttttttcacaactaaaacctggcgattacgtaaatatggcttgctaaaagctacttttttctgtcgttctggcgtaatgctgtaaccattccagagtaagtctatcgtaccgttacgcagctctgtaacgttcattgaccaatcaatcgtttgaaaagaaaccttaatgccatattgtttaaagactgccttagctaagtcgatgtcataacccgtcaattggccgtttttcttttcaaagcccattggtacaaaactatcgtctaagccaattaccacttgctttttgctggcaatcttattccatgtatcttgagtattagcttctttttgtacgctttggcaaccagttaaacataatgttaaggccaagacgatacctaaaatccattttttcattgcctaatcctcgcttaacggtcgaaccttgagcatctgatccgccacattctctgcaaaattcaagtcgtgggtgataatcagctgggttaaacccgatttttttaagcttaaaatcattttctcaacttctttacgtaaattaggatctagcgcgctagttggctcatcataacaaagaatccgcggtttcatagccaaagctctagcgatagctactcgctgtttctgcccacctgataactcataaggatactgctgttcacggccactcatttgtagacgttttaacaatacacgcgcatcctgctctgcttcagttttactcttttttaataccaaagtaggtgccaaagtgatattttgtaaaacgctcaaattaggaaaaagattataatcttggaaaacaacgccaaccttgcctgaatcataaggtttaccgtcaatcaaaatttcaccagaatcttttgtttccaaaccggcaataattcttagtaaggtggtttttcccgctcctgatggacctacaattgtcataatttctccgtctttcaaggtaaaagagatgtcacgcaaaattcgatgaccgttaaattctttgctcaaattttttacttctaacatattctcacctcaactacttgtaataagaaaagtatttttccagctttttcaaaacaaaagcacaaatactgatcaacagtagataaattacacctactaaaactaacggtactagcgttacgtctctggccattgccacattgccggccctaagcaaatcacctaaaccaatgacataaactagcgatgaatcctttaccaagttaattacttcatttccaattgaaggcaaaacaatttttattacctggggaataatgatcttggtcatcgtttgccagcggctcaagcgcaaaactttcgctgcttcaaactggccttcatcaatcgattggaagccgccacgaaaaatttccgcaaaataagccgcataattcaaaacaaaagcaaacaaggctgcttgatagcggggaaagacgatatgaataattggtaagccataaaagacaaagatcaattgcaataataagggcgtgccccgcataatccaaacataaaagttaaccaaccagcgtaatggtttaaacttacttttttcacctaatgagaccaaaattcctaatggcgttgctaaaattaacgtccagaaaaaaatacttaacgtcatgcctgctcctgacaaaagagcgggtaaaatttctgcaatatattttaatgacatactctcaccttcatttttctttcctaataaaaaagccctcttaggattaacctaagaggacgactgctcgtgattccacctcatgttcgcacctgctcacgcagaaatgcctcactaggttgatcattttaaaagaaaaaccctcatagccaaacggctacgagggcgaatgtaatcgcggttccacctcatgtttacaaattgctcacgcaacttgcctcaataagttcaataatcaacctttagctataacgggctatcccggattttcctacttttgttcagaagaccaactcacagatgtgattcatactagcaaatatcttatttccaccagcaaagactctctattactttgactagtattactatttctgttctaagttgtttttaatgttgaataaatcttaaatgatctagcaacttttgtcaattatttttcttcataagtatctggatcagcatcaagcaatggactcttttctccagtataaataatatctagcttatacattgcacgagaggtaatagtataaacaagttgagtttcatccaatttatggtaagcagctttagaggcatcccacatgactaccgcatcaaattctagtcccttagccaagtaagaaggcacaactagagtaccatcaactagtcgctgattagcagtcgcaattaaggtcgtgttttcaccttttttagctaattcttcatgcacaaatttagctgcagctaagtctttggtaataacagctgtcgtacgcttattttgttcattattatgcaaaacgttaactaaaacatcaattgcttcatcatcgttttttctgccccaaattataggcttaggacctttacggttaaaggcttcaatcttttcgccttgacgcaaaatttgcttggtgaaattggtcaattccttagttgaacgatatgatttcgttaattgcaccacatcagttttttcaggatcaaataagccagagatctgcttaagtaagctacgactttcatccttagtaaaaatagcctgattcaagtcacccaacattgtaaacttggcccgtgggaaattatacttcaagtaagctaattgaaatggagtataatcttgaatttcgtcaatgaaggcataacgcatctcaaagtcagtcctgcgaccagtgatcatgtcatacaaatataagtaagctgaaacatcattcatggcaatatggtgctgcttaaagttattcttaacttcttccacatgagccaaccaatcattttcatcaatattccacttagatagatcaaccatcttaggtacagctcgcaaaaagctcaggtattgtgctcgcatattcaaaaagtggttgtgcaaaatacgcttatgcacgcccttcaaggctgataatacaatttttctacctaaaaaggcctcttccttagcctcagactcaaattcttgatcaggtcgatcatataactcatttaattcagattggctcattccttcaatagcgtgtgccacccaagccttcttagtttctggcgtaatctttcgattcaacatcttgatcaattcttcacgcgttgcatcaattcggttggccaacttgtaattttcattgaaagaataatagatctccttgatcttttccttatcaaagtaaggtttcttcttatcacggaaataaatattcttaaaaataacaccgcgcttattcaagtgctctgcataacgagttaacaagttaaagaaattaactgaatccttaaacttagaaatattgctgtctgcagtttgatcttcaaactgtctgaataagttttcaacttccatacctggcaaccgtcgcgcaacgaactgccagtaagtcatttgaaccatattttgttcgcccatttcaggcaaaacattcttaatatagtcattaaacaactggttaggactgaacatgattacatcacttgaagtcaggttgccacgataacgataaagcaaaaaggctatccgctgcaaaatcgcactggttttaccagaacctgccgcaccctggacaaaaagcagatctgctttggtgtttcgaataatcttattttgttcgcgttgaatcgtcgttacgattgacttcatctgtgttgatgatttttctgacaaaacttccaagagcatttgatcaccgattgactcatcagtgtcaaacatgttcacaatcttgccatcttcaatcataaattggcgtttcttagtcatatcaactgtaatttcaccttcaggcgaattgtaagaaactttacccaatttaccatcataataaattgaagatattggtgcccgccagtcatagatcaagaagtgatcgtccttgtctgcaaaagaacctagaccaatataaatcgtttctgttcggtcctcatttttttctttaaaatcaacccgagcaaaatatggtcgcttctctaaacgctctacagtctctagctgcttagctgaatgttgccaagcatgttcacgttcactcaataattgttgctgctggtggattgacagtgctgtttccattgaagtggaataaccatcataatccaatttaatatcgtcaaaaaagtgtgaattaagctctcttgcttcgccttcagctgatttgatagatttttttaaagttttttcgcggtccttgatctgacccataatattatcaaggtgcttttgttcaagttctttttcgtttttttcagttttggctgtagccatctaatcaccttttctttaaaaattcgcatactattttaccatgaatagcgctttcataatagttttcctgctcgtgagaaaaatataaataaaaattgatgaaaactttaactttagagactataatcttgacatattggggtgatatatacatgaaaagattttttaaattactgagaaatgttctcttgcttgctcttatcgctcttggcgtttggacttatcagaacaatcccaatattcgtatcgcaacgcaagactccctagctacacttagctatcgaattaacgaacttctaactaacgaaacgaccatttctcccaataacgaaaaaaagactactaatatcaaaactgacacagataaaacagaaaatgacgattcttcagacaatcgtgtatggtcaaatcctgaagctaaggtttatatcgatattagcaataatgctcaactaagatcagctgcagtcaatgcaatgaacgcttggaatcgtaccggtgcttttacttttcaccaaataaatgataaaaaagacgctcaaatcgtcattaatacagtcgataatagcgacaccaatgccgcaggagaaacagcaactacctataaccctgctacaggacatttgttaaaggccacggtcaacttgaaccgttactatttgcaaaacgaatggtatggttacagttacaatcgaatcgttaatactgctgaacacgaattaggccacgcaattggcttaaaccacactaataatgtctcagtcatgtacccaaagggttcgatctatacgattcaaccgcaagatattaaaactgttaaaaagatctaccacgaaaataattaactttaaaagctcacctcttttttctacaataaagggtgagctttttacgaggagaaaaatatgaaaagaatttatatcgtccgtcacggtcaaacttatatcaatcgctacaataagatgcaaggttggtgtgacacaccattaactacaccaggaattgaaggcgctgaagaagctggtaaagctttaagcgaagtaccttttgacattgcattgtctagtgatcttaagagagcaagtgatacctgtgagatcatcatgaaatataacgccaacaaagacgaattgcagcacatcgctagtccatttttcagagaacaattctacggctacttcgaaggaagggattccgaaatggcttggcgaatgattggtggcagtcacggctacggaacacggcaagaaatgtttgctcatgagagcatcgatactattaaggattggattaaagaagccgatccttatcaccaagcagaaaacgctgaagaatattgggctcgtcttgatgatggttttaaattaatcagtcaattggatggcgctgaaaacattctgctagttactcacggcttcactattagaagtctctggtatcgctatggtgaccatattcctttggttccaggtcctaagaatgcttcaatcactattatgacaatgagtgaaaaaggcgaaattaagatacctaagtggaatttaatgcatttatagcaaaataagattaggcgaatcgggcctaatcttattttgtttgtttaattatttttgcaaaacaatatttttatatagcttcactgttattaaaaaacttcctactatttttaacagtaggaagtcttactctaactaatctttagtcacttgttttagtttttattaacttgcagtcgcccaaagtctgaatcaattgtttgccatctttttggtggaaaacagcgttttgatacgacaatcgttctttctttttactcttatctttatactttttaataaaggttacttcatagttaatccgactataattacgcttacctggtaaaacagagagcaccttgatctttacacttaatttcttgatactcttctttttatgccattcctttagttgcttagcaatcttcttatagtctgcattttcttttccattttcaaagtcatctgcatttggcgacttaagggtgttgtacaatagcttagctgcatcccccaccttaatcaagccaggccaaatcgggttaacaatatagtcaccttctgcatcctgatagacatctttttcgccattgccttgatattcagcagtaccatcataatcagtgacgtcatcctcactattagaaaattctgaactaatcgattgcgacaaatccgttaccctttcggacttaatagtttgaccatctgccttactcttaatatagatttccattcgcttagcaatcggataatccttgaaagtatagctaccatgctggttcaatttacccgccttacgatcattgatatagatcgtaccattaggaacgctgcgcacttggaaagtggccgttttgatcttcatatcaacagtcttatctgaccaaatgttaacaatcgaatcagcatctaaatggcgaccattaaccttagatttaactaatatatgatagcgaccaggaaagaccatacctaaatcttgatagtaattctggttgccaccttccatttcaccataatccttttggttaaccgtcaaagttgaattagcgtgattggtcttcacctgtgggcgatatacttgtatccacaacttatattttggaaaaagcaaaaaattgcgtccatcttgaatcagtctgatttcaccatgatcgcgattatggcgcaaattataggctaaacgtttagctgcactgtgatgctctttaaagtaattttgaagcggcttcagcgatttatctgtcacatccatatcaggcgttgaagccgtgacatactgagccagctcagttttaggatcctgcattttagctacaatgcggtcaatttgacgttctttagtgtaataaaaattgccaattagccatgcaataccaattaacaggataataactcccgatatccaaattttcttatgttttttcattgatcaaaacaccttttcacaaatccttttaacttagattaacaagttgatcaaaaaaagcaaacatcttttgttcacaaatcaagacgaagttcttattatatttagtagcattattttattttggaggggattgcacagtggaagtaaattttgattttgtaaaaaatagcagcttcaaggaagcctttcctaccgctgaaaaaatccacaaattatacacaattgatgattatcgtgacgttatttcaaattcacgtcttctattagagagtctaatcaaaaaaatttttaagttagaaaatctcagtccatattacacagttcatgatggcgaacaccgtaatttgcgtaataatacacattatttacgcaatgaactagattaccccctttcgatcatggatttatttgacgaaatacgccgcatgggcaacgctgctgtccacgataaccaaattgaaccagatcaaaagcaagcctggcactgtatttgtgatttacacgatattcttgtctttttaattaacagctatgagggtcaagacctatattatttgcgtcccgatattgcgatggaagcacaaactgatgaagaccattattatgtgcgccaaaataagcaaccaaaaacaatgaaattgcatgatcatcaaaatactaagaaaaaacagtccgtatctgcaccaaaaaaggcgaaacatgttaaacatttttccagtaaacagcatatagagcaaactaactctgagtcacaaacgaaaactactccttccactaaagacaattggttaagaaaaattaaagaactctttcaccatgattagttatattgacactatgtcacaatatgataaactatatattatataatttacataccgagaagcgcctatgacgctgccgatacgcaaatgaaaactgaacaagtttctcaaatggggaacggcttatgctagtaggtcgttttccattatttttttacgaaaggagtggttagtccgctatggataatcacaggcaaaaaccttggactgtcgaacagtctgaggtattaacaaatacaaaaacaaccgaaactggtttaactgaagacgaagttcgaatacgccagcaagctggtttaaacgagctcgcagctaaacctcctaaaacagtaatccaaatggtcaaagagcagatttttgatccaatgatcggtatcttattagtagctgccctcttatctgctatgtttggcgaatataccgaagccattattatcgcgacaatcgtagttcttaataccattattggagtagttcaggaaaaaaaggcacagtcttctttagctgcgttacgtgacatatctgcgccaactgcccatgtaattcgtaatggcaaagaattaatcataccggccaaggaattagtagttggtgatattgttaccttgcatgatggggacatggttccagccgatttgcgcttaattgaaacagctaacttgaaaattcaagaagcatcccttactggtgaatcagtaccggtagaaaaagacgcagctgctgttttaaatccagattgtgctcttggtgaccgcatcaatatggctttttcttcctcaattgtgacttatggtcgtggtcaaggcgtcgtgacagcaattgggatgcaaacagaaatgggtgccattgctggcatgttagaagatcaaactgaagtacaaacaccattgaaacgcaaattagctaaagctggcatggtcttaacgactatcggcttaattatttgtagtttggtctttgcaattggtgctttctatggccgtccacttttaccacaattcttggttgctatctcattggcaatttcaattattccagaaggtctgccagcaaccgcaacaattgttatggccttaggcgttaaacgcatggttaagcgtaacgctttgatcaaaaagctgccagcagtcgaaaccttaggtaacgccactgtcatctgttccgacaaaactggtactttaaccttaaacaaaatgactattacacaggcagcaacaaatgacttcagccaaagtcacatagtttaccagcttgcagcaaataaaaccaatcaaactttggcctatgctagcgctctttgtaacgatgccagcttgaacggtgaaaaagagattggtgatccaactgaggtagccttaattctttttgcccaaaagcttggctttaaccaatctaacttaaagaaagaattcccccgtttgttcgaacaaccctttgattcggacagaaaacggatgacaacattgcacaaaattgacggtcaattaacggtcttcactaagggtgcaacggacaaaatgttgccgttatgtacacacattatgactaacaatggcgtgcgtaaaattacaccccaagacaaaaagcaaattgtctacttgtctcaccaaatgcaagctgacgctttacgagtactaggctttgctaccaaaatagtggataacttacctgaagcaaatgctgatttggaaaataatttgacttttatcgggattgtcggcatgattgacccaccacgaaaagaagttgcagcatcagttaaaacctgccgtgaagccggtattcgcacaattatgattaccggtgaccacaaggtaactgccttggcaattgcgaaaaagttaaacatttatcagccaggtgacttagcaatctcgggaactgaattagaccaaatgtctgatgcagaattagatcaagctgttgaaaaggctaccgtttttgctcgcgtttctcctgctgacaaactgcgcatcattcaaagcttaaagcgaaatggtgaagtaacagctatgaccggtgacggagtaaacgattcacctgccttaaaggctgccgatatcggtgtcgctatgggtgtaacgggtacagacgtggctaaggacgtggctgatatgattttgcttgatgatagttttaccacaattgcgcacgctatcaaggaaggtcgccgcgtttaccgcaacatccaaaaagtaattcagttcttgctagtcggcaacattgctgaaattaccactttgtttgcggcaactatttttaactgggatgcgccattattggcagtacacatcttgtgggttaacttagctacagctactctacctgcccttgctcttggcgtagacccagcaagtaaaaacattatgaaacacaagccagttaaagctggtactttattcgaaaaagacctagttattcgggttattacccaaggaatatttgttgccctgcttactttaactggttacttcattggtaaagaaatcggcaatcaagttgtcgggcaaaccatggccttcagtattttagcattggcccaaatgattcgttcatttaatcagcattcaaatactgatcccatctggaaaagatcagctggcaataatccatggttaacagtgtcattcattatctctgcatttttcatgggtattattctctttgtcccagcaatgcaagatgcatttcacattaccagtttgtcagctggacaatggttaatcgtaattgccctagctttactttcaattgcacaagttgagttagtaaaaggttgggcaaagtttagaaatatttttattaatgacaataatttaattgaagattaattagttacaaaaagacggtagcattacaacgctatcgtcttttttgatattaaactttggctgctgccaattggtcaacatctatctgactacgaccaatctgaattgccttttcggtactttcattcaagctagcattgatcatcttatgactaagctccagcaccattggcaaattaacaccgctaactacccgtattcgctcaggatacatatcttcatattccgaagcgactaagtggggtgtcccattttttaaatcagttagcaccaaaatctgactattttgatatttattcatgactttagcaaaacgagccttaaaatctctgattcctgtgtcgtttaattcaattgtcaggatctgatcattcttgcctaccaacatatcatgtgcagacattagccccgcagccaacccttcatgagttgcaattaaaagttccataaaacgcacctctttgtaagcgatttctatagaaccattttaacatatttttgtattaattaagctgttcaatatctgctaataagctactttgttcaggtgttagccgctcatccttttgccgtaacttaagtacttgtagacaagtgtgcaaaatcttttttccttgttccgtcacttgtttgccatccatatcaggcgttacattggctaaaaagtcatccatctcatcagcagtaaccttgaaaacatcattttctccatgaatcaagggcatccgattgagcatttcttcaatcatttgtaatttatttctagcctcttcaaaatccatcttgttcacatccaattctttttcttttattatacaaaaaaacagccacctaagtgactgtcatctttatttcgtattaataattgcgtttgaaattgtagttgcattagattcgatcagttgatgcgaattgttaacaaaaagggaagccccaattcctatagcagcaaatacaagccaaactttctgtaaaactgtactcttcatgttcccagctccttatatttcttattatataaaaagctgatcattatggtaatggctacgcttacaattaacataattgtaatattatttacctttacttaagagttacttctccagcaacatttgtatcaaaaaagtcagcaatttgatggacgtccatcccttgccctaaagcccacattaatttggtaatcgcactctcagaagtcatatcacaagcagaaatagctccttccagtaaagcctcacgccccacctcatatttggtcaaatcgctacgttcatacaagcattgactgctggctacaacgggaataccttgacgaattagcttaccaattgcggctaccatgttgcggcgaataaagttcatcccgcctagaccatatgcttcaataacaattccacggcaaccactattaaccatcgcaaaaagcagattaggatcaaagcctggaaatagtttcaccaacgatacgtgtgaattaattttggtattcaaggttggctgaccgtcatgttctctttgaaaatgttctgaattaaaaactaatccatcggaagaaacggttgctactggtggcacattcacactttcaaaagcatcaaagttggtagtccgcacctttacactgcggcagcccagcataactttattatgaaaggctaaataaacatcaggtggacaagttgctgcagctgcaaaagccaaccgtaggttatcgtgagcgtcacttaggaccacgttaattggtacctgacttcccgtcagcacaaccgggatattaatatttttcagcataaacgacaacattgatgccgtataagccatagtatcagtaccgtgtgaaacaacaattccatcgtaatcattgcgatatttgtagatattttctgcaataaatttccattcttctggttggatattagaagaatctaattgcaaaatatcgcggacttgaatgtcgtacggcaactttcccaacattttaattaactcttcaccggtttccttgggtactaggcctgcatcagaagcaacggaagcaatagttcccccagttgatagcaataatattttcttcatcttgttcccctttatctcaaatcacaatgtcgaccataactattcatgattagatcaattaaaacataagccgaactaaaagttaccgcattttgcttactaaattgaaatggcgtagttttgaagaaaaagctatagtcactaagagaggctaattttcccgtttgccagctagtcaatgacaccaatttcagttcagtattcacgacatccatcttcttaagttcttcaataattgttttattaaaaccaccaaatgaaataacaaacagcatgtcattttcccgtgcagaccgccctaataatgctacttcgtcgcgtgcactaggcaaaataattgcttttttaccaattaagaaaaagttatgcgccaaatattccgcgataatttgctgctgccagccagtagagtaaagatagatcgtttccgcttgatctaaatccgcaaaaaatggttgtaagtttaatcccttaaaatatttaaaagtttcagcaatgatcttttgtaaatccgtattgaaatctagcgtttgcttgttcttaacgttttgctcctttcgtgtagctaactcggacaattcaaatttcaattcgctgaaaccacttaatcccaattttttgcttaggcgaaaaatagcggacttagaaacgtataatttctgagctaattccagcaaactcaactgacttgctgcttcaggatatttcaataaatagctaacgatcgctttatcggtctcattaaaactttcctttttcttcatgaccgctgtttctaaatccattctgtttcctttctcatcactgtttcttattaagaaaagaatatcatgtcgtactcaaaaaaggtagccaccctatttgagtaactaccttaatttttatttttgaattgaagttatgttatgacaattaattatttaagttctggccagtatggagcattaactggaatcatgtcatccaaaatcttcttagcaacggaagcatctggtacagtcttgtttaatgcaaatgcttgcagcatcttattgtatgaatgttcaacataagcatcaacaaccaatttttcacaagtttgttgttccatcatcaagcctctttggaagcgacctgctttacccgtagccattggttgaatgccatcagcaccaaacaatgctggtacttcaacaattgaatctggatccatattagaaattgcaccgttattagcacagttagctaagaacttttcatgagtgttaaatgcgatcgcatgacaaatatctacgatatattcagagtgcaaacctgaaatatcccaaatattattcttagcagttcccacctttacgattctttcacattcgccaaagacaatcttttgccggtgttcacgaatttcatcagtacgagtatgcttcggatcagcattagcaacttcatattgtgggaagtagtagtattgcatgtaattgtttggcaaagtttccggctctagcttatattcatcggcaactttcttaaaggtggcttcccaagaagcttcagtatccttgtcgtaatcgccacctacccaatagccgtgctctttgacatattccttcaacttaggcattaagtcttcgccagtcttcttgttgcgaacttctttccaccagcccaagtgattcaaaccataatagttaaagtcaatatcatgccaactgtcccaaccacaaatggcagccattctgtccatatcatcaatcggcatatcacaaatgttaattaccttagcatttggacgaagacgacggcaagcttctgcaacgattgcaattgtgttggagtagttgatcatccaagcatttggtgagtattcttccatccaatcaataatttgcaaaattgcgggaattgagcgaagaccataggccattcctccgggtccagtagtttcttgaccattcacgccatattttaatggaatcttttcatccaagcttctcatgtgatatttaccaacacgaattgatcccataacaaaatctacatcagtaaaggcctctttaggatcagttgtgtgagaaaacttaatttgaggtgctctttccttcatgataatttcaacagctttggcaatcttttcttgccgttcagcatcgttatcatagaacttcaactgtcttaatgggaatttatcctgactcttgatcaaatcaaggacaaatcctggagtaaaagtactaccaccgccagcaataactactgaatatttcttaccatccataatctattttctcctttaaataaaactaagtttttatcgctgtttcatttgccttacgcatatatttatatcatcttctcccacaaatgtattcgttttcaccagcttcagactttgtttcaagttttggaacgcgtttcactacgcgaaatatttttaaattttgccttaagtctaacaaatcaggtgtttaacttgcctttattagtaatagtataaaaatgaaaaaaataatcgtttcatgaccaagataaactataatttgaacattcctttaaccacaaaaataaatagtccatatttgatgatcgtatagctttaattacaaaatacgactcaaactagtttcacttccatattttgtagtgtaattttgaaattaattataattttaatatctttctactattttatatacaatataatatttttaaaacatatctttgctaaacgctgattttatcccaactcttagtcattagtacttgataatttacagataacttaggttataattatatatttttttatataaatttagcctttatcaaaaaactttcgaattatttattaaccgtatagtttttattttacgtcgccctaagtcttgataaactagcactctaaaaataacatccatgttttttatttaacacgatacgttattaaagctttccatgtatagactttgtttttaataatgttagtatcattccatgaagagacatataacgagctttaaggaattgactactccttaagcaaaaaaatgacttataaattgggaattcttttcgtaatataaggggattaggaaaaatgacaaagaatgttaagctattatcacttatcggtatcgcagccgctttagcaggtggaagtgttgctatttcaaataataacaactctactgttcaagctgcttctatcacattacccgctggttacaccaagagtgccattattaaatggaaccaaactggtaaagcaagtaaggctttgattgatgcttctaaaaaaggcatgaaggaaaacaccaatagtgatgcgggttcagataatacgttagttaacgtgactaaattaactgcgtctcaacaaaaagaactgagccaatacactttaagcttaattaattctgcacgtcatcaacttggcaagcaaggctggacttacaagcgaggtgctttgcactttgcaaatcgtgtagctaacgaatactacagccataacagatcttgctgggatgccgaccactatgttactggaattgaacgcgcagctaaggcttctggccttaactcaaaagtaggtcaagtctacgaagatgaagctggcttacctatctcttcaacatacaatactaacttacgtccaatgtcagtattgaaaaaccaaatttactttaacgtaaagcaaatgctttttggcggttttgcaggctctgacagtcagatgaatgactcatctagatacactgaatgggaacacgctggtgatttacttggttgccgtactaagagctacgatgctaagactaaatactttggtattagtttcagtggcttaaagggtgaccaaagcaaggttagtgttcacatgatgggtgttgctaaatgttacatccaaaactacagaaaattcaatcattaaaactaacgctgtagttaaaaacttaatacagtttcctaatccaagagctcaagtagttcagtcaactatttgagctcttttatttttgcccatttttcatcaaaatcctgtcaaaaaaatgcagatatccacacattttcaattaagctatctaattgtttgtatacattagctaatactaatagtgtgttaagttattatcttattactattttgtctataatccttgataaatcaatgtttccagcaataactgtacataattaacaacagtacagcaaattatgattacaattaataaattttttcaaaagcaatttttgcgttatccatgcgggattttcgcttacacaatctattacattattgttatctaaaaaaaggattgctatattaaatagcagctggtatattctatatcaatatgttcaatgaacataaaaaagggaggataaagatgtatttcactactacaagaagaaaaactaggaaagacaggatacatatccaattctttgcacaagccttaaaaaaagacctatcacaaggaactgtttacaagtattcagttcaaagattctgtgaagctgcaaatatctgtcgcggaactttttaccgcaactttaaaaatttgaatgatctatttagtcaagtactgcaattcgaaatcaattcttgcttcaacaatccccaatcaagtactttacataaaaaagcacacaacttactgatagaaattgaaactaatgccacctactatcgaaatgtacattctcttgcctcaagtcaaattcgaacacaagttgaccaagctctttttcgtgaaatgcaaaaattgctattcaatagtaatctttctaataagcatatccaaagcatttccagtttgattcttattcgaattctagactggattgctcatgactatcaggacaatgtcatcacagtttatactgacgttgaatgcctttttctccatcacattaaaaaaagttgctagcaacgaatactagcaactttttacattaagcataaattttacgttttaaaataccgacataaggtaaattacgatataagccgttatagtcaagaccataccctactaaaaatgcatctggagcttgaaaaccatagtaatcagcatggaagtcaactactctagttgtcggcttatcgagcatcgctactacttcaacactagcagcaccgcggtccttcatcacttcacttaaagcttgaagcgtacgacctgtatcaataatatcttccataaaaattaccggttgatctttaacatcagattttatatcttgagtgatctttaccttgcctgttgattcggtaccggcataacttgaagccttaattggatcaactgtcaatttaaagttaagtcgcttgatcatgtcactagcaaaaatcattgccccatttaaaacgggaatgacaatcggctgcttgccctcatatttttgattcaattcagcagccatctcatccatgcgcttatctaattgtgcttgatcaaacaaaattttctcaatgtcgttattcattatctgtctaccctttgaattcataattttaccaatgatccgattctagcatgattttgaattgatttaaagctttttagtgcttaaattgcataatttgttcatttattgtctatatggactataaattgttcgggtttagtggaagatagtgttttagtaattgaatatcacttttttggataaacataaaaacagcattctttcagccaatgctttaggaatactgcttttatcttaaatcttcttaatcatatggtcataagtacgatcgccaatcgtcatcgatttttcaatttcataacccttatgcttgtataaagcttgcgcacgtggattttctttgtccacatttaagctgataatatgatagccatgagctaacgctacttgttctgcctcgtccatcagacgactagcaatgtgttcaccccaatggtcgggatgtacagctaacgcatcaatataccactcgtgtggccaagcttcttgatcatcaaaaatcacggttgaaatgagtaaaccagcatttgcatagttatggcgcaagacaacatcgataatcttctggtccttataaggatacatatctaaaattccggtcaccttaccatgatcttcagctacccaaattcggcggtatgaatagcgataatcctcggaaatgaaccctaatttcattaagctatagaattgatcttctggcaaagattcaatcgacttcatctgcatttcatcaaaaatttgctttaagatgggatatacaaaaggaaaatctgtttttcttgctcttctaatcatttttctccctcaaaaattactcatcgtcatgatcattatcaaacaaatcaacatcatcaactacgtcaaacttaattggatgttctggctgatgcttcaacatgtcaagcaaggtagttgccttaggttccaataatttgctgtcatgcattaaacgatacagtgcaaagacctgtgcatatgtagcccgaatcagcaaaccatcaacctgataagcggcatcattatcgtctactaccattgatgtagtcaaaaagtcgcgcatctttctctctgcataatcgtcacccatcatttcctttagtgctggatccatgtcggcgtatgtatgtgacagcttagtaactcgttcaaaattgtaagccaaatcaacattaatccgttcaagactgtcctggtctaactggccttgattcttgcggatttcattagctaaatcatcgattgcttcaccaaatgcaccaaaaacataatcaagtgtcaactgggtctccaactgctctggttccatatcgactaattgtgctgcattctgtgcattccaggcaaaagatgggctcaaaactcgtcctggtgtctggaacaaaattcctgtcaatccttgcttagcagaatattgaacgttaattgaaccaggctcaaaatcacaacgtttggttaaatttcctgcggcagactgaatcttagggtatagttttgctacaattcctgaggtgtcgccttgatcactgtcgatgacgattgaaccgttttgccaggtatcatgcggattattttcatccaaaacagagaaattcgggtcaggagtaaaaccggcatcaatgtcttgattaggtacataaatcagggaatgacctaagaaattagtgattacatttgcatcttgatcgtcactgattgagtcaatataagccatcaagctgtaaagatagccatagcctaacttgttgataatctcaattaattgatccttatcttcgttgtcgctagcttgaacgtagctattcagcttttgccgcaaatcatctagcgtccgttcattggtgttagacaagtagccatcgacgtcagggatgctgtaagaaaagccgaaaactaagcgatacaagtaatccagatcggcacaataagcgtcccaatcatcatcactaatctgacctgccgtatcttgcaaatcgcgggcaaaattaaggataaacgaaatggctaaatgagccgcacattgctctacactctcattttcaatcattgttgcaatcttagtacctagaatatcatttcgaaaaatcatcacatcattaggcgactgcaaatacacaatcaaatcgtgctgctcttcgtcatattccacgccaaaagaatctgcagggatgagattattttgcaccaatgcttcactagcctgacggaatttagcagccaatttttcagcctctggtcgttcaatcggatcgcctattagattgctatcttcattgttacccacggcttgatcagccttatccggcgcattttttaatagagaaaaatcaggatctggcttgaacagatacgaatcattcgggatctccattaccatatgatagaccacgcgaccagctgcttcgtcatcatcagttgaacgttgcacttccttaggaatcgccaataaataagcgtcaggcatttgggctaattgagtttcagtctgggctaaaatatctgccccatatagaccactagctgctaaaatgctctgcaaattttctcgcacatcggccgtggacattttatccgtgtcacggtaatagctgttaatttcggcatttttttgcgtcaatctataccaagcgttgtatagataatccatatcctgacgtagctgcttaggatcaagatccacacgctcttcaggcttcgttgcgtccataaaactgccagccaagctaacgataatcccctcaccgttagaagcatcatcttgttcaagaatgtagccataagtctgatcattcaagagcaggctaggaatagtcaagttgttaggtgtctgtaagtaaatcaaaacactgtcatcatcaggattaagttcggcgctcaatgaattagggacaatgctgccgaggctgtaaatccaaccgattgcactgtcgattttgttaattacttgttttagttttgcatcttcagtcatggaaaaactccttcattattatcgaaaaatgctgtaagcaattacattttcacatatttacgcctcgattgcattctttttgccggttggatttggtttttgggggttgaattctattttttaagcagggaggggaataccaaaatattatcaaacaaaaagtcctgctttcatagatagtacaattttatatatttgtactgtctactaaagtaggactatatcacacaagccagcgtctttaatttttacatctaagccgcaggaatattcttcagctcattctgctcggccactctaaagaatgggagataaatcacaatacctattgcaatcaaaatacactcaaaaataatgtttctccaatccatcgagctcatgtaagcctggaagaagaatggagtaaacgatggatcaacaatataacccattccaatccagtgaagactttcagcaaagtaagtcaacacaatgttaataactggtgcaatcaagaacggtattcctagaataggattaaagcaaattggagtaccaaaaataattggttcattgatactacaaatgcctggaataattgaaagcctaccaagtgcacggtacttttcaactttactattcatcataagaatacacaaagccaacgaattaccagaaccacctaagacagcgattctgaacatttgcaaattcatcaaatgagtaggagcaagtccctttgcaactaatgcagcatttgcaccagttgctgctatacctgtagcaaatacaattgggaaaatgacattactaccattaaccccaattagccaaagcaaattacccagagtcacaatcaaaatgtaaccccataagctgttagctaaaaaggtagctggagttaagcatttcattataaaggtagtaaaatctgcatgagtcattccaactagaattagatctgcaccatagaaaataaagatattaaccagtaatggaatcaacgaattaataaagttagctaccattgggggaatagaatctggtaatttgagcttaaaattacttttttcaattaaacgattaatttcaactgcaagtagtccaataataattgcaacaaataaaccattcgttcccaaattattaatgtcgatcttattatttttatcaacagttgtagtgaccattaagaaagtaactaacgaaatcatcccatcagttgctggatgctctctgcggtatcctttgctcaattcatatgcgataccaaaagcacaaatcatcccaaacatacccattgtcatattatatggaatagtaatttgagcataatgagcgactgcccaatatttccaggcagcaatccatttcatgaagaaattagctgttgctggattatatttatccataacaattggagggttagcaacaattaagaaaaaggaaccaattaccaaaaatggcaatccgaaaagcataccatttgaaatggcctgtaaatgcttttcatttccaagtttttgtccaataggcgttaaaactttatccaatttagtaatcagtgattcttttttagcagtagtttcggccatcagaaatcacctattttctttactaaaacaaaacgctttttaattaaatttgatatggattgaacttgaatgcgttcggaattaccttactgtcatcccagttttcacgaatcttatgatattcgtcccaataatgattattcacctttaattgcggtgtaacttttgaatcaacttcaaggaagtgcatacttcctcttcccatcttcttgccacgtgtagtatgcttgtccaaagcataatccggaatcttagggacatagcctaaagcaaagtttttgattataatgttcttaagcaaatctgatgaacggtctttagttgattcacacagatagcgaatagcgtgaacaaacatcatagcacgatccggttcgttgtaactaaagttttgacgcatctgatttaagctattgataagaattggagcttttggattacccatgccgatatcttctactgaaattgcttgaagacgacgccataatttttcttccatttgtggggatgaaatgtacatctcataagcaaattcacaggcagccctttctttgcctttccgaatcgatttttgtaaggcagagataacttcatccgcagctaatccattacgtgttcttgttcttgcccatggatcagctaaaaattctctatctctgttttgtggcacttcgtttttcttaacatcattttctgacataatgagtccttcctttgacacacgaggagaaatacaatgaatattcaaaccatctgcgagaaatatcaacttaataaagatgaagaaaagatccttctttatatgaacgatcaccgttcagagctgaaaaatctaaggattcgcgaactggctaaaagaacattcacttctcccagctttatcgtcaagacctgtaaaaagatgggactttcaggatattcataattggtctttctaattacagatacaccaaagttccctaataatactgaaaatgacttaaaagtaagatcttgcgtaaagcctttctccaatttgatggataagcataaagactcaatgatcatgatattgggcagtggcttttctcaaaatattgctaactatatgagtgagtatctaaatttatacggttttagatgtactgcaaattcacatcttgaattactccgtaaaaataaagacgctctaataatagtaatcagcaattctggagaaaccaaacgtttagcagaactgtgcattcatgctaaacagaataatagagatattctctctttcgtaggtgaccgtaattcaactattgctaaaaactcatcacttgtaatcagttcagatacgtttactccatcatcctttgatagtcattaccctcagctgttttttggtctaacactcatctattttgaattattaatgagttactttttgtctaagtaggtacctttccttaagacactttcatcataagcgctaggcaattgatttaaaaggttttagggcttattgaaaacatattcttatttttaaaaacaacctgaattgtcaaattaagtgcaacagttaggctatgaagaaatatattgcttgaagagttcctctgctgtgtgatattggaggattcggcgatatttgtggttaatggcatcagttgcctgttgaacataagcttttgacttgtctttcatgctcttgctcttagggaagaattgacgcaaaagaccattgcagttctcattggtgcccctttcccatggagaatatgggtgagcaaagtaaatctggcagcccttgatcttggtcatatccgcaaactcagagccattgtcaaacgtgattgatttaaaccagtcaggatgtctgtcaatctccttttgaagcagcctttggcatgtacttgcccgatagtcaggaatcttgataactacttcaaagcgtgtggttctttcagtcaaagtcattaaagcaggctgattcttgcgtctgatgcctttaaccagatctccttcccagtgcagcggagcttttctgtcttcaacctccttaggacgctgttcaatggaattgccaagatgcttcttgtgcaaagcgtgaccgccatggctgtgatgacgcttgttcctgcgtcttttgagcttcataggcagatcaatattgcttatgtccaccaagccctgatcaatatacgatagacagtaggcgtgctgggacaagggtagcctggcatagtccttttgaattcaccaacgaattcatcaatgctggtggcatcaaatttagctttaaagcgtctggagagcattctcaaaaaaacagcataatgctttaatggatcccgtttatagtagtttctgcgtcgcttatcatgatagatttgtgcaatatcagcgtagtaatgctcatagagtaaataattatgatctctttgcaggacgctaccacgtctgatttcacggctgatagtcgatttgtgacagccaacctttcgagcaattgcggaacaggaggttatgcctgaatcaagcatagcttgaatttgtccacgctgctcacttgttaattgatgataatgtctagagacgctagaatttgaattagtcatgaagatcacctttcttgatttttggtcacttcaagttcaggtcttcatggcctttttgtttaacacttagtgttgcataaatccgggatcataaaaaataaccaacatccattaaaaatgttggtcataaatttactaaatattcttttttattacatcttccgaataaacgtgttcatatcgtatgggcctaccttgtagtcagagcgatccacttcttccagagcatttgtcttaatatagccctttttcttcaagaatgaaagatcaatagtttcactagtcatattggacaaacgcaataccatcgtatccttgatagtataagcaggataaagtgctgaaacttcaataccatctagtaagttaaggtctaagtaggattcctcatctgtgatcttcggcagattatctggaaattcaatgtcccagatcttgttatccaaacgatttacaaacaaattgtacttttgaatttggtaagaaacatttggactaagccatttatcaagacgtgtggcaatattcttttcagacaactcttctccagtaaatggagtaatgccaaactcaaaatcgttattgccaagttcttctgccatcggtgttggcgtcatgacatgtcccactgaagtggtatcacctgaagcacgacctggccgccacaataagtttgacttaccaagttgaccagtcgttgccattaatgttacatagatagaatcatcaactagctcatattctttctcgcctttgccaaagaagtagagaccatttttaccgtcattttggcccacagctcgatcaaaaatataaatattaactggcttttctacaaattcatcattccaattatcatctattggctcattcttagtctttctgaaaccgccttgaatttgagtatgagcatattcagtttgcatccttgacctcattctcaatcttaaacgatgagccagcacagtattgtttatatgcagacgacaggataataccttttcgccattggttagggaaacagtcaatttgaatgggacttctttcttttgcccatcttctttcaaacgatcatccagactgtaaggcaataaccatttaccttccaaaatcagttccttataggttgaggtttctttcttggttagttttccattccaattaagtctaatctcgtggtcctttcttagtggtgaaaagtcatacgtatcgccatcatttgcctgatcatagacagagataacatcataatattcttgattcttatctctcaaagtaaatttgccatcttggtaaacaactgtgagttgatcattggcaattgaattattgtccagctcttgcaaactagttaattcttgatcagcgtcttcaaagtgaattaccttgtaacccaagccattcattctaagcttaattaaaacatacagcttgtagtatccaggctcatctttaaactcaaagccgtttggtgtcaattgcatgatatttggtcgagttggagtatatttttctttaaccaaagtagcttcatatttatctggaaatttgatcttttttgaagctgacatgaacgtaattaatttataaccatcaaaatcataaggatcagtattaaaaactatgacatctttatcagttaagttcaagcgttgagcaattctctttttaatatagttttctaagccatcagcaatttcaaaagcctgcttaaatctgtgatcaatatcaactgcaacgttatcagttacactgcctcctaaagtatcgtgtggttgagaatcaaataattgcttccataatttaatcaataatccattggaaacttgaatactcgactttttagcgatcagcatcagaggctctactcgtcttaagatatcttgttcaagcttaaagttcttgcgcttgtttctggatctaacagaagcaatagttctatgcactcttgaataagttggatatctcaattcaccctggtaagtattgagtttctttgaacgaagccgtttcataaattcagggtacgtactaatttgaacatcatttttgctatattgattaatctttttaaccgtatcagagatgttatgaactatattcatctggtcaattcctgatgggattaaaacctcatcattattaccattcttagcctcaaattcaatgcctttgtccaatcgattcttaacaaaatcctttaaatttttctttgaagccaagtcaatctgacctgtatagtatcctaatggaaagttagcagcaaatacaactgaatttcctaatgcacgccacttgaagtaaacagaccctgcttgtctcttaaaattagtaccacgccaagaaagaaaatcatgaattcctacttgattaagaatcattggtaaattggcattaaagccgaaagtatccggcaaatagcctaacatcattgccctaccataatattttctggcatcattaataccaattaccaaatttctcaataaagattctgcagcaggaatatttgcatcagtctgtgtataccaagggccaataaataattgacctctttcaacaaggtcatgaattctttctttagcttctggatgaatttctacatattcatcaatgattgacatttgtccatctaaagtaaaattggcttctggatgagattctagttcatcaagaacttgagtgaataattgatcacttaatacttgagcatcttgagtggtaaaataccattctctatcccagtgtgtatggttaactaaatatgctttaaccatgttttgcctcctatttttcatacccaacgctttgaattattgttcttaacacgtctttggtttcattaattgttttacatttatcaattaaatttctaaactgttgattttgttgcaaatcaactaaaaaagtaaatagttcttgaatgttcggatagtctttcttattaacggaaatcaaaaagacatacttaatcatgtttttatcatcccattttatcggttcattcaatctagcaaagcttacctttgattgagtggcagcatactttatcggatggggaattgcgatcccgccaccaatggccgtagaatatagatcttctcgtttatatacattgtctctaaagtcgctttcaacataatgatacttttctagatcatctatcattagatcaaggactttttccttagttaacttatctttaagtaaataaatcaatttaccatcaaacaagttcataatgaccttatttttatccgaaactgaaacgaggtattgataaagttcattactatcattctgaaagttagataaatctacctgaattactggtaatttactttcataaattggcaccgttgaaattacaaagtcagtattttttaaatcactatgctgatattcatataatgaataaacacccacaatattcaaatattcactaaattgcgaagataatctagcctttagtaacatagcagtagcagttcctgagccgcataccaatgcagctctctttttatcccaacgattgttgtataacctttccattgaagcaccaacatgaagtgtgatgaaagctaactcatccggggataatttcatgttaagttgatgctctataagtggtgaagctgtcactgtcatttcataagccaatgggaaagttgaaacaattacatttagtaaaggattctttctttgtccattaatatttttaactttcagtagtaattccaagtgcttctctaaattacgaattagttctttgtcttgcatgagattgaaaacatagtcgtccttgattctatccaagaactcaatgacaatgtcatgtatctttttgtttttcacgtcattattactatgctccaacataagttgtggataatttagagctaggtgataaataaaataatgaaattctgcttcactatattccaattcatagctacggaaaacttcctcaaaaaacttagaaaccttatcaaaatattcctctctaatgtaagggatatttcgattaaaattacgaagctgattattagttttgctgcgagctaactccaatgctaagtgaatagtgatatttttatcactataatcagacataggaagccccagagctacgattaaattggtaacttttgtcagtaacttgtttaaatctaaatcagaaaaaatcaccttttctgatttagagaaacctcgaacataattattgcctcttttattatcgatataatcaataatgcaactacgaatatccgattctgaacctttcattcttaaaagatcgccatctttttgaatctttagatgatagtttttggctacctttctagcttctttcaaatacttatcaactgttgaatcactgatatacatagtggaaataatgtcatcaatctcacgcggtttggttagaatcaaaagaagaaaatcttttaatcgttttttatagtcgtcaccaccatctgtaacgataccactttctttaatccgctcgaccaaggacttaaacttttctcgatcattaataagtagatataagccatgtccccgtttattttttattgagacatcgtatatcttaagagaattattcaaattcttaatatcgcttcttaaagttctagttgtgacacctaactttgctgctaatgctttaggggaaatataagtatcattatttttagaaattaaagacgttaaaattgattttaagcgtggttgtgtaatagacatgcaaaagtcacctcatttctataaaatgtagcttatcatattatctaatattcataataaatagatactatcttatcatgtgtaagcttaggcaattttactgtattatttactacctctagctttttaagtggctcttcctttaaatctactaattctactttattaggagccttgttaaatttgagttcatcttccttttctttaaatgaagcattgtacagtcgaataacgtatcctttacgctcttctgctttttttactgtactagtagtaaattcacccttcgtttcaaaaagactatattcttcagggagctttcttttgactacattaaatggaaagattaatcttccatttaagaattccgcatattcaaacacttgcaacccagtcttaaattctttggcgacattagttacgtttgctttttcaaaatcgcaatcagtaatatatactccaaaatcaaaacttaagaccttcttcaattcagcagcgagagttgctacagtagcatcccctgaagctcggccagggcgatacaataaatcagcttttcctaatctgccataagttctgaataaggttaatcgaatagttgaatggtgttttccaatatcttcgtactcacgtacaccgttagggaaaatagcaaacatattgttcttatcagataatgaagtataagtttgcattgtattaatcgaaattggcttttcttgccaatcatttggatgttcttgccaatccaatattgccttcttcaattcaaatggtctcttaatgctgccaaattgaatatcatcaattgacccatcagtcactatttgagtatcaaaatcaatacataaacgatggtctaacggttggcgattatctgtaactaccctaaatccaattactgggttatctttctttaactttatctcaagagataccggcattaagacaaatgcttttctatgtgcacgttcatctaaatcagctggcactctaaaatcaaagtcaatcttaagttcattaagcaaagcagatttattagcttttactttaaatgcttgatcggtagaataaattacccaatcttttttagctggtgaatagttataagaatctccatcatcgccgttgtcttctaagatagcttgtttatcgaaaacgcgcccatctgtttttcgggtgattcttaaacttccatctaaatttacttcaattttgtaatactcattttcaatcgtagtttgattgcttactgacagttcatctgcttttcctacattaggaatcaagtaatattgttgatatcccattggaggaatatttttgactactaggctaatctttgttttataaactttttctggctgataaattctatttcctgggtttaattgaacagttgcaccattaacttcttctgtttcatctttaaaaccggcaactacaaagggaataggttttccatctttatcttgaatctcaaaattctgcgctggagtgtatatggttttagtaactaatccactttttgcaacaggagtggtattgaagaccgttaacgtaattgccttgtcgtcaggcttttttatctgaaccgagatttgccgcaaagttagttcaactaaacttgttgccatatctctagcttgtttatatcgtaaatagatatcttcattaacattatctgaaacactatttgccattgaatcatgtgcagaattttcaaacattttttcccagatatcatcagctgcacctttaggataggaaataccaaattgggtacccaaagttaaaacaggttcaagaatgttagttaggtagtcttgaattaaagtattcattttcttcaaatcagatcttgaagaatagtttgttttatgaactctcatattcttaccgatattgaattcaccttttaacatgttcagcttaggtgctaccttatcaactgcagcaatatattcttctaaagaactaatcttaaatttaaaatctttatttctttcatttaatttttctattacttgaggtagattatttctcgctggtgccatatcagaaccttgaggaaaaagaatttggtctgttgttgcttgtttaactacactagcaaagggctcagatgtcataatcttatctaaattattttcatcaattagaccacctatgaaataaccacaggccattcgataaacattaattcgactgccatcttcacctttccaaataaattctgaatgcgtagcttcataattgggaaaaccacgccataaaacagctttatcaattcccaaccccttatagatttgcggcatactagattcctgcccaaacgaatcaggtacatagccaatattcatgtagcctcccaacttactacatattttcattccatataaaagattacgcactatattttcaccagatggcaaaaactgatctgtctgtgtataccatggaccaataataagttttttatttttaacaagattctgcactttctttaaatcttgtggacgccattttaaataatctgcgatcaaagatgcttgaccatctaaaataaagtgattaaaacctacattgttttccaaattattaattacatcttttagatcttttaataagtaaatctgtgcgcgagaggtagtaaaaaaccactccctatcccaatgcgtatgtggaactacatgaactgttttaaccataactaaccttcttttctaataaaaaagctatagccaaatttaaactagaggggaaaagtactttgttattgactatagctttttgtttatttttcaaattaactgatttattcggtagtaatgtctaacttaatatcgtcctcgctaatctttttaccgttgtcttcagtgaagttggcaactaatggagcaacaacggcaataaacaaagcacaggctaaaataccacaaacataagcaggaatattatcagcagttaagatacctggaataccacccaatggaggtatgtgtgaacttactcccattagttcaccaacgccagcacctaaagcaccaccgattacatttacaaagattaattgtggggctttcatccagaatggaatagcaccttcagtaataccgaatgtgccgttgatcaaatttgtacgccccatttccaaaagttgtggagagaatctcttcttaggccaaataaaagtcattaaagcataaccaagaggaatagcacaaatggcaatattagtgtaaagacatggtttgtaaacaccttccaggaagaagaagttaccagcagcccaagcagctttattgacaggaccgcctaagtcaacaccaatcatgccacccataataagagccaaaatcaaaccattagtatggtcattaaccattgttttaatccaagccaacaagccagtattaatccacgctaatggacctgcaagaattaacccattgacaatagctacagcaccagttgttaacaatggagttaagatcaattcattggcagaattccacttttcaggaacattaatatgtttacgacaccaacgagcaacgtaaccagcaatgaagccagctaccatagctccaataaaaccttgttgagtattagtagctaattgaccaccaataaaacctgcacccaatgctggtttatcaccaatggcataagcaatataaccaccaattactaagttgaccaagccaatacctatccaaccaacttggttgacttgatacagcatatggaagaagccagtagctttagcaaatttacccagatcatttacaccacaagccatacctatcaattgtgggataccaacgataagggcaccaccaataattgtaggaatcatgtaggaaatacctgtcatgatatagccttgccaatcatgcattagtttcttaaatttcatcattttactcccttcatttcaaagtagttaaacattattctgttaaactaggcacctttgactacagaaacgcatttcttaagaagagcttctggagcttgaatacaagtattaatatcaactctgataactttctttcccttaaaacgatccattccttcgatcttttgatcagagccaattaagacaaaatcagctttctgggcttcttcaggtgtaatttcatgaactcgacccataattccttgctgctcgatcttaacgttgtaacctaatttctttccggctaattctagtgccttagctgccattggcgtgtgagctagcccagctggacaagaagtaataccaacaatatttacatcactcataatttattagctcctatctttttcctaatatactttgcaatttcttgtgaatcgtttaatgttttcaagttttgcttaaaatcatcttccaataaagcagtcgacagattggcgagcatctttaagtgagtattacctgcatttttaggtggtaccattaatgcaaaaacatctgtaactggtttattatcatatgtcttccattcaataggtttctctaagcgaacataaataataccaactctttccacagcttcagatttagcgtgtggaattgcaaatccatcttgcaatcctgttgaatattcttcttctcgctttttgaatgatcccaacagaccttcaggatcattagtaaagccaatttcttcagcatattcagaaattttctttaacaaactttctttatcagcgacgttcacgtttaaaagaacatcttctttttcaaacttcattaaatcacctctcgtattatataaattgtaattagtcatattgtgataattaatcaaattagtatttgctttttgatcttcacatgttagcctctaattgtcattggctttggtcaactggtctaggttatcacctcctgcagttttgtctgctttataagtctgccacccagacagttcctttatgctctaactcacatgctgtattgattgcttctttttgctagtccttgagcaattgggattaggtgcagctttcaaagaagcaaccagtgaatacttatactggcgagattgaacttaagaactgtaattaggggttaacatgtgaagatcaaaatctatgatcagaaatttgaaagaaaggaggccatttccaatgaaattatttgtcggtattgatgttagttctaaagatttacaggtcgttgcacttgattcagaagatcaaaacaaacgcttaattaacgatagctttgtcaatgatctttatggtgctagtgaactgaaaaaacaaattttagatctagctcaaaataaacactatgatcaaatcattattggcatggaagctacatctatttacagttttcatcctgcttactttttccaaaatgacgaagatttacaaaagctcaatgtagagactgatgtaattaaccccaaagaaaccagcaggtttcataaagtctttgaagaaagtaaaactgatcctctcgatgcttattacattgctttgtatctaagctttggacattatcgagtaagcattgccagacaagacaactatcttgctttagagcgtttaacgcgtaccagatatgaattagttcaagaactgactcgtaccaaacagcacttcattgaagctttatattatcgggttaataaactaatcactgtcgataaagataagattaatactcctcttttcggtgctacaatgatgtctattgtaaccgatagtaaaactctggatgagatcgcggatatgcctaccgaagacttaatttcttacttacaggttaaaggcagaggacgcttttccgatccagataccttggctaaagcaattaagaaagctgttagaggttcatatcgcttaggcaaagtaatgactgattcaattgatgcagtgctttctgttcattacaacatgattcaaagctttaatgaatctattaaagatctagaaaaagcaattgatcgtatcgttgatgcattaccagaaagcaaaattctggaatcaattcccggtattggcaaaacctatacagctggtattatcgctgagatcggaagtatcgatcgctttgataaagaagaacagctggctaagtatgccggcctaacctggaatcaatatcaatcgggagatcacagcaacgaacatactccaatggccaggactggaaacagatatctaagatattacttgattgaagctgccaatctagcaagattacatgatcctgttttcaaaaaatattaccaaaagaagtatgatgaagctgtctactcgccgcataaacgtgcttgcacattaactgcaagaaaattagtacgagttatctttaaattgctcaaagatgacaaactgtacaggacaccgaggtcttaatttcaaaaattggtctaaatttaaaagtaaacaaaagtttaacattaaaaaaatcaacctttaccaaggcttagtttcatatactcaaatttatgatcaaaaagaacaaatatcatcgcctttcatttgacttattaccacatgacttgtccgttgggccttctttgtaaccccttacatctaatatgattgcatattctcttctataagtaatgtctcctaatttccacttaaagtggaaattaaatatttataaagttacgtcatgtcctaaatagcttaataacagttcacaaaacatcatatttgcccatgaaaaccacggtcgagtaaaatcactaggatcattaggattaaaactctcatgaatcatattgctaccattggttgtgttagccattaaatacaataaattctgtttttctgctttagtctcttgggttaaccctactaatgccatacctattggccagatatttcctttaggagtatgcggacttccttgaccactccaatattcaccaatatagaaatatggattatctggagacaaaatgaatcttcttgtgttttgataaatgtcatcagtaggtttaacgtaaccaatataaggagcagacattaagctaggaacattactatcatccatcagcacatagttgcctctaccatctacttcataggcatattgctttttaccattgtgctcaacaataccatacctttgaattccttcattaatttcattttgcagtgttttagcctttgcaactatatctgaatcatccaaaatacttgaaaatatttcttgaatataatttaaaactactacggcaaacatgtttgaaggtatccagtatccatatgtacatgcgtcatcactcggtctaaatccagaccaattcattcctgtatatgccacaggcgttcctttacctttattctttaaagtatcagttggaacatcacagtccctttcaaaggtgtagttagaattctcatgatgttgctcagttttaatagttgccagcatctttttaattccagaaacaaaatttgcatcaaattgagctgtttcacctgtgttcttatacagtagatatgccagctgtactggataacagagtgaatctaattcatattttctctcccaaatccagggacccatttttgctttatctgtttgatgaccttgattattggcagtcatattaaatgcattagcataaggatctaagttcatattaaaaaattgccgttttactactcgagtaataatatccttaatgttatcgtcagttttagctaacaataaatatggtcttaattgtgcagatgaatctctttgccacattgccggaatatcaccggttaatacaaagatatttttattttcatcgacctttaaagcattctgcaaagtatctaagaaagtcttgttaaaaattgtatataaacgttcatctttagtgccacattctgcttccacttcattcatataattctttacttgttcatcaataatgtctttcattattttcacccccagccaaattataaaacgcttttataattaaaaagaagacattacttttcaccttattgtggaaaacaaataagccattgcctgtatttttacaaagcaatggcttattcattattaaacggttattcctcacccggtgcagatataactattctcattttaccagtgaaagtgaaattcttcatctcatttggaataattaaattagttccgatcttcaaatcatatgatttgccatcggcttctaattttccttcacctttaataactgaaactaaaagatatggatgatcctttaagccggtcttccatgtaccatcgaggtcaatttgccataagtagaagtgtggtgaaacaggtggttcaactaaagtcttgatttctgcatcttgatccttattagtcttaacatctagcttaggatcaacatgtggcacagttgtaacatcaattgacttttgcgtatgaagttcacgctttttgccgtctttaccaacacgatcataatcgtacaaacggtaagtaacatcacttgattgctgagtctcaataactaaacagcctttagtcaaagcgtggatagtacctgcaggtacgtagaaaaagtcgccagctttaactggaacctttctaagtaatttgtcccattcgcccttatgaatcatttcagccaattcttcacgatttttagcatggtgaccataaataatgtaagcacctggatcagcttgcatgacgtaccaactttcggttttaccagaatcattttctaccttacgggcataatcatcatctgggtgaacttgaactgaaagattatcattagcatctaagaattttactaataacggaaattctttagccttaggattaccaaaaagttcaggatgctttaagtaaacatctcttaaagacatccccttgagtggaccctctgttacaatagaagcatcgtccttgtagccggaaatgatccaagcctcaccgacttttccatctggaatatcataattgaaaatatcttttaatttacgtccgccccaaatttttggtctaaaatacgggatcaaaaataatggttccatttaaaatcacctcatttttactttagctcatttaaaatcatctagaaaggtatggcttttctttcttttgaagaaaaaagatacacttacgaccacatatttcaagttggtttggatctataaaaagatataaattttataatatcagtcggttataaccaattaattatttatgtaattaggatcttatttcgtgaaaccgtaaaatagtttgtgtaaggatgaatgattccttaaatttatttctttaaacattagaaaaaggagttcctttctcgtatgattggtttgaacaaaaaaacacatacagaaagaagaactccttcatgaatgattttaccaaagattttgctcaagctctattcaatccagacaaaataaatgatttattgcgcaaagagctacaacaggctgttaataacttgttagaagctgaattgactacctttctgggctatgatccctatgccagaaatggctggaatactggcaattctagaaatggtgcttatttccgcaaggttgatacccagtttgggccaattgaagtgcaagtgcctcgagaccgcaatggacagtttcatcagcacacgctgcctgactacaagcggcactcggatatcttggaaagcatgattatcaagctatattccaaaggcgtaaccaccagagaaatagccgacttgagtgaaaagatgtatggcagtcattatagtccagcccaagtatcaaatatttccaagcagatgttccccaaggttgaggcttatcacaagcgcaagctaagcgacaagtttttctgtgtctatttggatgcgacataccttcctttgcgccgagaaacgtttgagcgtgaagcagtatatattgccattggcattaaacctaatggacataaagaagtcattgactactgcattgcgcttagtgagaacattgaagtctggacagagatgcttcaaaacatgaggttcagaggcttgatggaaattgagtccgatctgctggtcttctataattatcccaaacaaatcagagcttcaatttattcaaccagcatgattaaatcctttaacaacgtcatcaagcgtaaagctaagcctaaagcagagtttccaactgaacagtcgcttgatgcatttattggtatccaggcaatgagctacaatgaccgctatttcaaccgaattcataaaggctttggtcaggttcaggataccttagaatcctattttgattaaataaataattaaaaaatcaatttgcgagaaagaactatttacacaaaagatttgacagtttcataaattatctatcactagttactacttataagactaacatcttacttaatcaaactttaaacaaaaaaataagaggtgaactacaacatcgtcacgttatagttcatctcctactttaagttgtttgacaaagagtcacattagctagtctctgtctcttactacatacattaatagttaagaagtggaaattaattaccaaagcacctctatttcaatgaacctgggaatctaaattcatatgaactaatcgggcctactatatcaagactagttatttgtttgactaattcttgaaataaaattattgcgttattaacaccataattgtttactattttttggattttttctggacttttaactttttttggattctcaatatcataaaaataatccactttaatatttaaagtcctatattcagaatcattatcattttcttcatttgagcaattggcatgccccgataatgtcacaattgcatcgtttgcagaaatagccacagaaatatcatcaaacataaattccaaatagaaactgtcttgttgctgttctagttcacctttgtattcataattaagtttattaattataaatccattatatttaagctgtactgacatcgttatctcctatttctttaccatttgtggttgaaaaactgatttttttattcccacctgatagaaagacagtgtcttttgtttattagagctttcgtttatcttcatctttgctattactttagaagttttatgctgtaatgttttattatctatttcttttatttttattcgttttcttgaaaaactagataacttatttaaaacttgctgatatttttcttcactactttctaaatcaatttcctgctcaacttctgtatacgtgcttaaactcaaacccgttaattttgctgcttcatctctatttaaattcaaactaattctttttccgaaaatcttttgtgataactggaattgatatgaatttaatctactattatttggattgattttattgaacttcatgtctttcgtttctccttcctataaaattcttttccctattattcaccaattgattatgaattagttcagccagtttcccaagttgatcagtaagtaaattcatttttcttatttttctttgatctttagtaggaaatttagtaaatccatatgtccagacaaaatatactttactctcatttaatgtaaataaaattctacagtttttccttacgccttcatttgtttcagaaagaaagcgaatctcatatacatgattttgtgacatcaattttttaacaatctcgtacttgatatatctgttagaatttggaactttatactcatccttaaaagaatatccaataataatcccttcttttacttcgggctttaattgttcaatattaccactactatctaaagtaacatttgaaagaaagttgataattcttaacaccgattcttgaatattaggattaagattatattcatcttctaaatattcttcggctaatttttgctcagacaagttatcatttatcaaatagaactggcgcatgggtcactctcctttgtctaaacattttacgtcaaaatcatgatattttccattctttgttgaactacagtaagtgttaatgtttttgcgatagactatcagccatagtctaaccttattctttagcttcatcaattatatcagcatccccaacctcagcacaaaagaaaaccgactccataatattccctgtcaatagctttttattccatcaaaaaaggaggacatagttctctttgataaaaaatctattccactaaatattttataaataaaggtgatttctatgtcctctcttaatcattgtattaaatcgagcttgacattaaagatgaaaatatcgtttttaaagcttgtttgaattaacaaacaataatgtcttaaaagataccacgccaaaataaaagcgaccttcgttcataagagcaaagaccgcaaacttgttaattgtctcaccacagaaattaacactcaaattctaaccttacattgcactaaaaatcaatacaactctacgccttctcaagcaaactatggtcaatcggttcgcccttcaaatgcgcgccgcgaatcgttttcgcaatcattgacttgcgcttgctcttcttatcgtaaacccagtcgccttgagctgtggcgatattctcaactttggtagtatcaccatcaattcttactaagaatgctggtgccattgttgagcgcttgttaggacctgaagcaaaaccacggttggtcatgtatgaagttactaatacttctttcttgtttcctttaattggaacagcatagtatgaataagttgaagttctccagttaaatggaacactagctaccaagacagctgcgtcgccattaagtggtttataaccataagttaagtggtctgaaacccagccgagcatggcaacattgtcaccgactttggcatctgcttgctgccacaaatcatcaccagtaccacggttcaagcgagttgtagcaaataaatggtacttgccgttcattggaataatgtttggacgttcaatttcatcagataccatcaagctgttaactaatgatggcaaaacttcagcaactttaggattattctcattcttggtaaggcgaatgataccaatagtagcgttagcccatgttgcacgactcctcatgtcgtcattagcagtcacctttaagaagttttgcaaagcttccttgggtgtaccaccataatttttccaattatagacctgattttctccttggtaattattactaccagttgaagcttcaaaaatcaggtaacgctgaccaccaacagaaatcacatgcgcatcacgcatagcaacgttatctgcacctttgttggtagacttccattgcttgtatgtctgatagtgataaccatcaccttcgaataaaacatggcggtgacttctcttagctatcgaaattgtgtttttcttcttgttaaccttcagcttcaagttaactgttgcaatcttttggtgattagtattttcacgggtgtctacatcagcgtagaacaattgaatactgccatctttgtttaccgtagctgagcctgaccattcttgatcagttggcttagcattaaaaccaaagattggaccagcacatttccaatggttaagattattgtcattgtacttgttatagagcaaataaatgtgggcatcattttgctgaggaatccccatcatggcgatcattaattgatagcctttatagttaacaactctaccagtcttagcatcttgtactggccatgaatcccaaatttctagttccgctacttgaccagtttgtgcatcacgcgtaacggttgccggcatgtttttaatctttttagcattaaaatatggtacgcgatattgcgcatcttgatcaatcatctttttagccacgccagcatattgatcatagctccagtgagtactagtatccttatcaagctcattaaagttcaactttcttacttccttaagttggacttcagttaaatccttaggattaacatctgcagcttgtaatatttgaacagtttgaggatctaacttgtaaactgctgcgtcgttattttggctataactagtattattaaaaccattagaaacattatcactagtagattgagtagtgtccacccctacttggttttgagcattctgatcagtattagtagtatctgcaacaccagtgttgttttgattatttgtattattggtggtgtttgccccagtattattttgcgttgtttgatcttggtcctgatcagtagctacatcattattttggttagtttgtgcttgattttgatctgatttatcgttttgatcattagtggttgcagcttgagtatttctctgaccaactgcaggttgctctactgtatcagctttaactgttaagctgttatttatattaaacaagccaagtaaaacagctgctgatgcaaaggtaactaatgtgcttctcttgttcatctctgttcaatttcccttctgttattccatagccagtttattataatatcttgttcggatttttggaaccttcttaatcaaattgaaatattagctgtgattagcaaaattagatttagaattgaaatgctgtactaaatattaaaaaggttctgcttatttatgctgacaagtacaatttattgttgaattgtagctatataaaaagtctggtagctattgccatatccatctttcccttaatcgtatgcatcccattacagccaaaactcatattcctcaggaaaatgcatactatttaaaatattcgacatagtatcagggttaaattgctccttaccatctcttagtaactgtttaatagcatttgctatctcaacatattctgcctgatctaacaccagtctaagacttaatataagttcaaatacaccaggttgactattaagccttaaatcgtattggcccaagatatttctaacagaactcaaatttggtccccgatttattactttagaataagttatttcgttatgtgcaacagcatttctaaacatattcgtaacatggtttatatgttcaataacttccggcgtaatagcattactctgggataagtcattagtttttctatactttaaagtgaaatcacgtgctattttctgccttaattcatccttgcagttaatgtagaaataatttaaatctccaaaagtcataaattccgttacaacccataatggtatacaagtatgagaatcaatataatgctttatcgcatttcttcctcttttatgcgcttcttgctctatttttgttgttagtgagctgattgtttttaaaactctaacagtattatcactatcgtgcttaaaattattaatatccaaataagaatattctacaggaaacatttctgaaaacctataagccaactctgaatttaatgtagtttcataagaaagaagaccattgtataaaatggctctcaactttttatcaaactggtataaagagactatatcttcaattttcgttccattaatatactgatgcggattaattatattacctcggtcattttttcttaaaaagagacctttgtaaccattaattaaagtataatagcctattttacttaatacatttttagcatagtcgtcattttcaattaacattcctttttgtcggagaatgtctatttgctgatccaaatttttaaaaggcctactcgttagttccaatattaactcctaaaaaaacaaaaccttgataataacatccaatgtgaatattatatcaaggtttcgtttagtttagaaccttctcctagtgcctctaaacttgatctgtcttaagtattattatacgtagttacaaatatgtttgcaactaattagataactttgtaatcctttctattcctacacgttttcttaaactaagcattaaactttgtttgtaacaaattataaatagttgcgctttcaacctttagtaaataaatatcaatctcaatttatacaaaattctgacataaccaatcaattactttttgaatctattttacgattgtaatcatcaatagcctttatagtcttagtaatcgtttccgatccaattgattgatataattttttatcaccaataataaagaaccatacttttgctcttgtagctgcaacatttatgatatttggctcacttaccgcccaattagcagcacccttttctttatcagaagcacctagaacaagaaaaacaactttattctctttcccctgaaaagtatgaactgttccaacatttgatggcttaccattttcatatttaataaagttaatatcctttagttctttagtcaactgataagcaacattcttaaaaggagtgatgacaaaaatatcatccattgtaaatggattattcgagttgtttacaattttttgaatcaagcgttttaacattcgtgcttgttcttctacaaatttattttgagatacgccttttacatcaatccaatttcctgctccaatttttccttgtttcttttctaatttaccccctttagcttctttttccttaacattacttggtaaaaccattttattattataagaaattgtattagctatattaaacattggatttaaacagcgtctatgtacccaaagcggaatgccaatccaattttgatgttctttgtctttataataaccgtactgactagcctgacccataatcgcttgaaccgatgtatctccagaaacgtatttttcacctactttgaaaattcgatcaccaataagtgaaatcactttagaatctaaagtattgacaggcttaatttgagcgggatctcctactgccataattttttggctacgtagaagtggacctactactgattggggaactgcttgtcccgcttcatcaataaataaattagccacagaattagcaggtaagtttttaaacatccgatgaaaacttgcaaatgtagtgctaataattggaactgcaaaattaatccattgccaagaatatagcgttaattgctgttgattttcttttacctttttatcttgattattccaattaactatcgccattattagtgatttgctattttcataaagaaattgttttcttactcgcaacgccaatacaaacagcttagattcttctcgtaaatcattcgaggtataccaatatgtttcttcctcaaattgatcataaacatccctatttgaaaaatcacgttgatagtttggaaccattgcttcctttagcttttcatcatttaatattcgagcataagtatgtgattcaacttgcaattgatctattttattttccaacttatgcttctcagcatttttctcctctatcacacgttttaattttgataatttttcattctttttccttttttgggttatcttttctttattaaaaaatctatctctaaatctaacattttccattgatgaagcaatttcttgatactcttctttcttagaattaatctcttctgttacttcttggagaactggcgttaatttagaaaaaagaatatcgccatttgctacagtcgttatcttatactcttgaactttttcacgccatttttgtaattgccctaaagaattcgcataatcttgcaattgatttctcctattttcaacaagattatattgttttataaaatcatcataagcatcggtgtctgattgataattttcatcttgcaactttttaaccatttgtcctagcttatcgataatattattcatattttccttacgaccaccttcaagcgaaaaaagtccccaatactttggcttattcaaattggcgttagcgatatcatcaaagtaatgaacattcaatagttcatcaataacttctttaaagacatctttgtcaggaatttgcggtaattcgtctacaatattttgaacagcaccattattagaagaagttacgactatatttttattagagatttggtcgggtaatttcgtttgccccaccttactatctccaggtaaataaacatttttcttatcaagatcacaaatttcttttgcttgtctaactatcaactcagcaaagatatcttttaataaagtagtttttcctgtgccagcagggccattaacagttctgatatcattcttatcatttatagccaagttaattgccacttgttgcattaaagatgctggaaattttgacaaaaaatgccccattggataatttttaggttgtaatattttatcaaatatatcaatattcttcgtcggatcaagattaatccgttgatctggatttaaaccattcaagtaacgttcaagatgatcggacttttccttttttgcccagttcaaatcatcaataaaaaatgaatgtaaattaatatcatctgaatcaatctttttaacgattgaccaatagctcgtctttttgctaattttatatcgttttactaatttcttaaaagcttcattaaattgaagttcaaaacttttttcatctaaatcattttcttgaaagccaaaaagttcatttatgtcatttttcacctgatcttcaaactttttgaacttatctgaatcatcaattaattcttttttattaagcacataactactcattgtaacaaaagtttggtcttctaataagtgtaagtttttattaaatgcaatagaaactccaaatttagtttgcttattattaacttcgtcttgtaaattttttaaatgatatttgtgaacaattatatctataacttgttgaaacctaaaggtatcaatgtagaagatcaatcctgaatttgagctttttttggttaaactacctttatatttacggttaatcatccaacgaaagtattcataatagccatgtccctcagcctttgttggatcaaattgcttagctgcatttctatccccacgtttagtatttacgtcaccctcagatagttgttccattaaaatccatgaatttaatatattcttctttatttccatctttttacctattatttttatatcaacctatcaacaactacttaaacttctcacacaaaattgtctattttcctgtgatctgcataattttgcaaatataaggacgcatccccatttcatttctatgatagacaatgctagctaaaatccaaaatatttttcatgccagcaaagtacagatgataaaatttacagctccttttatcattcgctttttttcaaaagaaaaatatagaatgcaaaacttaaaatgattaatataattatccacgtagatggaaaagatgtatttgcaaatattcccagcaaaaatgcaatcataatattggctaatacgtcttttaaaaagctataccaccattttgatttagaaacttgatttgtattggcttcaaattcatattttataagcgcaaccacaaaaaacataccaaaaataaacagcatcacaattaatatgttcagcgttaagttactactaatccaatttattaatgtgcctataaaaaacaagttatagatatcatagtaattattcgctacttttgtgtacttctctaaatttttatttttgcgatacatataacaagcaaaaattacatccaatattacaaacaatatcgataagaaagcaaaaaacataaatttatatgttattacttaaacttcccacacgcaaaattgcttgtttcattgtgattctgcgtgttttgacaaatataaaaggcacaagtccttttcattgctataattatattgaccaaaacataatttatttgcatgaaaggcttgtgccaatgtctattttaccatctcctgaccaacaaaatgaacaactattttcaaactcaatcatcagcttcatcaagaagtttcaggtgatcaagctgttgagaaaatgtggcttccgcaaggaaaaaggcattagcctgttcagcttgtttctttacgttttaagcaatgtctttcgtgaccgcagcttatatatgcagctgaaaatggatcattttcaagaaaatttttccaagaactcatattaccgttttatgcgcaacgttcacgtcaattggctccacttcaccacacttctgtctgcgcaaatcattaataaccacttgcgatctttgacttcagaaaaacgggctgattgctttgttgtcgatgattcctacttctctaggaccggcttcaagaaaacagaattagtcgccaaagtttttgaccatgtatcaatgacttacaagaaaggttttcgcatgatgaccctgggctggactgatggagcttctttcatgccaatcaattcagtgctgctgtcttctcagaagctacagaatatgattggcgaaaataaagtttttgatcagcgcaccattgctggccaaagacgtatgcttgcccggactaaaggcacagacgtgatggttaatttaatcgaccaagctatgaaagcaggtcatcaagccaagtacgtgctgtttgacagctggttctcaaatccacatcaaatcgtccagctcaagcaaaggaagctggatgtgattgccatggttaaggttagctccaaaatcaaatatgaatttgagggagaacgcaaaaacatcaaacagatttatcgcagctgtaaaaagcgatgcggccgttctcgctacctgctgtcaatcccagtcaaagtcggacgccaggacaaagacggtgctaaaatagatgcacggattgtctgcgttagaaaccgtgccaatcgcagggattggctggcaatcatttgtaccgacatgtcgcttagcgaagatgaaattatccgcaactacggcaagcgttgggatattgaggtttttttcaaaacttgcaaaagttatctaaaactaagtacggaatatcatggcctgtcttacgatgctttgaccgctcatgttgccatagtttttactcgctacatgcttatgtcagttgccaagcgggacgatgaagatgaacgcacgctaggcgagctgttctattgcatgattgatgagctggcggacattacttttagccattccttgcaattgattactgatgcaatgctggccagcgtaaagcaagtctttcatgccagtgaagcacaaatagctgaattcacggctgactttatcaatcgtttacccaaatacatgcaaaaattgttaaagaaaactagcaaaaataatatagaagcctaaagccaagcaagatcaagagattactggcttatttagtgtgggaagtttaagtaagtaataaaattatatcaaggttacatatctcacagcaacataggaattataatcggctaaatgtaattgtcgttccttgtacaagttttgtgctcctgatgaattgaagcaccgtaaaaatgttgatcaggttaaaatttctgacagctccatcttagcgatgcttatttggcaaactgaaattggtatcgaatctcaaagaagattttgtaaattctttgtcggtttgtctcattctcgctttaatcgtcgggcacgaatgcttttgcctttaatgcgctgtatccgtcaagattggaatcaagaagtaaaaacagctggagaattcttaattattgacagcttcccagttccaggttgccagcctgttcgcaattatcatgtcaagatctttcgcggcatagctgatatcggttataaagctgctaagaaaatctattattatggtttcaaggttcacgcgctagtaagtgataatggctatctgcttgactacgcagtcactaaagcagcagtgcatgatgccaaagaaacagtagaattaatgattaatgctcatccaattaatcattatcttttgggcgatgaaggctacttaggaaaagatttagctgccgagttaaaaggtatgggctatgtgctttggacaccatatcgaagaaacatgaaaggcgctaaaaagcataacgatcatcaactgatggcaattagaagaacaattgagagcgacttttctttgcttagctactataacgctgaaaataactaggcaaggagcttagctggttttcagcagcggctagaaatagccattttagcttaaacatggcatattgtctagaacgatttaactagcaccacgcatattaatttcttatcttataataaacattctaagctaaatagtgaattagttatccgacgggataattgattcactatttttattcttttgtagaattaaagtagtagtaaaacgatatgccctgaggtctttagacacttgatgtcgcataataaactggcagttttgcttgagttttcaggagtctcttcgaagaatgtggacactagatgtcgagtttagaaaattagatctgatttcttaaataaatacgttttactactaagttttggaggtttttttctacgtaaagtcaagcataataagaagtttggctttacgtagaaataaagacctctctttaatccactgccttacttcatcaatattcattacttcttatttctccccatattcaactgctgataattacgtttaaaagcattgaccttatcctcagaatctaactgacttactaaatccaatctatttttagaaacattatcgcttttcttagcattccatacaatataaaaaccgtttttttcaaaccacataagctcatctgaagtatgtatctttgaaagattattattaacctcaaccttagctaataaaatttttctgatcattttaaaatctttaactgaataggttctttcaaacaaattatacttatatatttttccagattctgacgttacatatagattaatattacctttattcctatatccttcctgttctaagaaattgattaccttgttcttatcattattaactgactttaaatcaattataaaatcagaaagtggaagcatatatgtatctgaactactattcgaccttgactttctaattattaaacccaaatcttgcaaagttttattccaattagtaattgttttttgagtaactttaagagttctagctattgtttcattactataatatgaatgtccttctccatttttagcatgaattgcataaaatacatataaatttatagcagccgagcctatatatggaagatatttttctaaagaatttggtagcataaaataacctgttttattatctttaacatactgaatccatttattataaagaaaagttggatttaatggagtagatgaatcggaaagatttaatttgattgacataattttcccttcctaattttttactaactgtattatcgtattttaaattaaaatttctaagcagaattagtatagtttggttatagttaaattatagtacttggttattattaatgtatagttagtacgtaaaataattccacctgtcattagttaactgacagaacatgtgcttgaagttgctttctaaacgcgttacactaattttaataaatccaacaacaatcgacaaaattattgaatttcttagtaaagatgttagaatagagaatagttaagagtgatggtatctctgaggagaccattgcgggattaagtctctattcgttaggatggaggcttttttcttgcaaaaacaattcaaaaccttagatgaacaaatttcactcttaaaagaacgtggcttaataatacctgatactaacaaggcaaaacgatatctattaacgagtaattactacaatatcattaatggatatggtaaatattttcaagattcgcctgatcattacgtaactggtgcgtctttcaatgaaatttgtagtctatatttttttgaagaagaaataaaaaagactgtatttaatgcagcccttcaaatagaacatcatctgaaatctattgttgcttatcgttttgcggaacaatatcgtgaccaaaaatacgcttttttaaatccatcttcgtataacccacgtaaattgagtgatgcatgtcgcactattaacaaattttcaaatattttgaaaataaacataaatgatcgcactagttcaatttaccattacgtgtcaacttatcaaaatattccaatctgggtaattatagatcacttagacttcggaggattatatcattttattaaagaacttccagaccaaattcttaataaaatagcatctgatcttactccatttttcttcgacaataatggtattactcttggtcaaagatttactcccactataatgcttagctttatgaaaaacattttggaaataagaaatgtatgtgcgcataacaaacggctaatagaatttaattgtcatgcagatgctaagtacctttctgaattgcatgatcaatattctattaccgcttctgaagatcgtaaaagcttttataataccttcataataatgcagtgctttttaagcaaaaccgaattttgtattttaaatacgcgtggtgctagttaaatcgttttagttaataaaaaagtccaatcggattagactcaagttgtaagtaaattaaatagaaaagagtctgatctaattgaactacctcaagcttaatcgtttctctcaccatttacaagttagttttagtcgtttaaatgtaatttgtcgttcactatataatctttatgcgcctgataagcttacgcatcgaaaaaacattgatcaaacaaagctttccgacagctccatcttagcgatgctcatttggcaaactgaaattggaattgaatcccaaagaagattctgtaaattttttgttggcttatctcattctcgctttaatcgtcgagccaagatgcttttgcctttaattcgctgcatccgtcaagcttggaatcaagaggtaaaggttgctggagaatttttaattattgacagttttcctgttccagtttgtcagcctgttcgtaattatcgtgttaagatcttccgtgacatagccgatattggctataaagcaaccaagaaagtctattattatggtttcaaggtgcacgcgctagtaagcgatgaaggctatttgcttgactacgcagtcactaaagcatcagtgcatgatgccaaagaaacagtagaattgatgattaatgctcatccaattaaccattatcttttaggcgatgaaggctacttaggaaaagacttagctgccgagttaaaaggtatgggctatgtcctttggacaccatatcgaaaaaacatgaaaggtgctaaaaaacataataatcatcaactgatggcaattagaagaacaattgaaagcgacttttctttgctcagttactataacgctgaaaataaccgagcaaggagcttagctggctttcagcagcggctagaaatagccattttagcttataatatggcatattgcctagaacgatttaactagcaccacgcgtattttaaataatactcttagaaaaagattcaaaaacctaaataatgatctaaatactattagtataaatgacattttcctaaaaatggggtttcctgagaattggcaattaagatctccactcccgcaataactttatccaatttactgttaatatcttgctcaccttattagatattaacagcttttttattccatcaaaaagaggacatcatcctctttcaatgcatttgatatacaagttagaaacattaattttattttcttatcaaatttacgggaacatatactaatttttcatctttttcaagatgccattttaaaggatcagccaccttttcaattttgcccttgacttcaaaccaatccgcaatatcaattatgatatatttcaaaaagctaacctctaatgtatttataatgggcagaaaaaattggggggcgatgaaaatcaggaatcaaataagacatattcggcgggaataccttaattaactctacagttacattattcatttgtcggcgggcttgggaccttcttttgccagccagactgcactggtcccaagttttaattttgccaataagattgtcattgcttttagtcgacatcaaagcaaaactgactggcaaaaatgtattgccgtcactccagcctaaggttgggccatgatagccagctaaagttttgcctttgttatgatcgtagacccaggccagcagttccgactttttagcggaagaacggggcatcatcgtatcatcgacaatcaagactagtcgtctgcgcttgtcaatgactggccttagactggcaatcaatctggctgcaattagacaaagcagcttctgccaattaatccggccatccgataaaatattgcgcacagtcctggtatgagcaatgcggtccttttgctttttgccagcacggaacagtgaatggcgagaaaaacgcagttccaataaataagaaaaaagccagactaaatcaaatttggattttcttttaaagttgacctgatgactcaattcttttagaccaattagctttaaaaagagagaaattaaatatttgtgtcctgctcttgatcaatttgcgttatacttttcatgacgtaagaactcctttactttgtttttgttcacttaaagtataacgcagggttcttgcgttttttgttatagacaaaggaaagccaggaaccacgcgggaaaaggcgtaatttctagctttcaacctttagattctaacatgtacctgccacacataaaagtaataactataatttgatgcatttatatttatccaatttctaagcttggtgctagttagttaacaaaaaaatcccatttttaagaatgcaaagacttacttagtctgttaaatacttaatcctattcatttactctttatcaacaggatttcttatagaatgtcaatcattattatagagaaaaaaagagtatactaaacataacctcaaaagactagtcttttggcagtttttcacttattgcgtgctaagcatttattaatgaattgccttagaataattataaagttgatgtgtgtggaccaaatttataatagtgcgattcaaatgattggcacacgctattaaagctaccttgtcatgcttattgaaaggtggcttttttaatttgtaatagtaatcaattaaatgattttgaattttgccttgatttcttagcatacttcgaatcatgtctgtttcaacagctctgccttgactactacctctacgattaattgtatcgcctttaatgtatttaccagactgatatctgtttaaatccaaacctaggaaagcattgagttgtttataattatcaaagcgagcaatatcaccagtaaagcccagtaataaagcgctatttaattgacctgctccaggaatactggaaataactttgaagtcatctaatccaacagctgtcttaattaatttgctctgaatataggctatttctttattgtaactttctatttcgtcgcagtattcttaaataatttcaatttctaaagaatctgctgggacagcaggataagagtctttagctgctaaccaaacctgagcacaataactttgaattacatctttatgtattcgcctgctaacaaattgataaactctattagtcatttctttaagagttaatcctgccaaaaagtcaggatgacaatacattctaaacacttgtaaagctaaaactgcataagcctttttaaagatctgattcagttccggaaaagtaagctctaagctagaacgaagaaaattaagtattctggttctatatttaatcaactgcttatatctcaaggataaaatccgtaaagagtcataaggcaaagcagattgtttattacaatgattctttatttctgttaattgtgttgcacctaataaggccaatttaaatgaatcgttcttgtcggttttatttcttctcaaagaagccattcttaatttggcttctaaaggatttaattcataaaacttaactttcttgctttttaaataagtagtaagttgagctgaataaacacctgtagtttcaaaaattattatcgtattggaactaatatacgaatttaatatttgaaagccgctcttattatgcttaaacttaaaagttactttttccgcttcttctgttatcaaagttgcatgactttcaccttgactaacatcaataccaataatattcacctaatcaccccattttaatcgattgaggcaaatattcattttcagctccatttcttgattatacgatctctgagatccacacccttaatctagtttgattgaaaataaatatttatgagcccgtttgacagtcgaattcaatattccattctgttgtcgacctcaacctcaatctaagtataagaaacatactaacctagtgttggatcatgaatcgacggattcacgatctggcactttttattttgtctaaaatagaaagtgaagataaagcaaatcaagtcttcagctttttagacacttgatgtcgtaaaagaaacggactgctttaccacctattcttaagtctcttcgaagtctgtgggcacttagatgccgtgtttagaaaattagaattaataggttgataaagaggtttatcttcacagcggaggttatattatggaatcacaaattattttcggtattgatgttagcagtaaatcttccacagtttgtgtggttaatgaccggatcaaacaaggcgaatcttttagaatctctaatgattcctttggctatcaaaaactttatgagcaactgaaccaatatttgataactcctttagttgttttcgaagctactggtgtttattctctaagcctgcaagctttcttagaggattatcatattaagtatttgaagcttaatccgcttaaagcgaaaaagctaatggacaataatttacgccataataaaactgataaggtagatgcttatcgcctggctttaattcaatttaatgccccgcaaaagctgcgtgatccacagcccagagagtatcatgaacttcagaatgccagtcgctattatgaagaacttactaggagtatagttactactaaaaatcaattgcaccgcaacctccaatccactttcccacaaattgaagaaatactgtctcatccatctggcagaatttattgggcgcttgttagtcttttcccacatgctggatatgttctagaaaagaatgagacacaggtaactcaaatgcttaattctatttctggaataggacaacaaagggcacggtacttaaccacaagattatacgcttttgctagagaagcttatccttatgattccaaagatagtattatcgttagagctattcaaaggaacatttctaatttattttcactccagcaagaacgcgactatgtaattaactacatggaaaagctggctaaagcagtaaacgctcgtgctttatccatctatttgagtatcccaggggttgctagaattacagcagtgagattagtagcagagctcggtgatctaagacggtttagcacttcagctcaaattgatgcgtttgttggcattgatccaggaaggtaccaatctggtgaaaaagacagttctcttggcattaccaagcatggcaatcatattgccagaaaaatactttatcgagttattattcaaatggagacggtaaaggctacgcagccttgccatataactgattattatgacaagaaaaaacgatcttcaaatagccaaggctataagaaaatcgccattgcatcagtccataaactgatacgcacaatgtttgctcttatcaaacatgatcaattatatgattacaacatagccaccaaaaataaaagactttagctgaaatcaaataatcaacttaagtataagcaacctatggaaaaactacaagtattcataggcttatttgtggtactttcgctttttcttaaatttaaactcttatttgctttaaccttattcgcatcattaaaacaagtaaatttattttcttaaatcattgataatacttgactttgggtagaaaaaaaggtagataaaaacatcgtcatgtttctatctacctttatactttatggtgtttgacaaagagccattatctcaccacagttattttttatcacacacagattttttactattacttatccttttaattattagacctatactccataatacaataattgagattaacattcttgtaagatcttcacttatataacttttaatttcatcaggctgtccaaaagtataaattgtaccaattaataaaatttgcatgctattgttaaaaatatcctgaacatatctatcgaaccatttatacaaatactttttgcagaggaacataataactaataaaactatccacgctataatataactcatgtagtttttcttagatataaaaaagacaatactaataaataacgcgttaaaaactgtgttcatcaatgaagaaactttatcagtaacatgaaataatttcttcccattctttttaagaaaacaaatagcacatgaaaacgttagcaaaaaagaaataaaagataaaagcattatccatttataattagcaattatactgtgatcaaaatctgatagtattttttcgggttcaacctgaccaattattaaatcatgtgaatacaaataaatagtggttgcaagcattattattctaatcaccataaattctaatagtgccataaatgtcccactaattatcttatctttacaggataatgtctccttacttttacttgacataaaaaaggaaaacattaacatgaaaaagattaataaggttacgtatagttcaggaatcttaatgacccaaatcacagttgaaataaagtcacctggatatggtttaaataatatagaaaatagcagataaaatactattactttaacaataaagcaggcacttcttttaagaccaggtttcaaactagtattactcaagtaatacaaagaatataaatacggcaaaaaataagttattatagcaaaaactgaagtaataatttgtagtgtaattactactttcaaattattagaacagttggcaaaatatcttaatatcagattaataagaaaatacatgcctgccgcaagaaataatacccatggcgacttaaatttcttcaaaatcaatgttatttttcctttccataattaattagacctatttaactaaaactttattaaatacgatatagccacacataatcaaagattctagtgtaatattatttgataaaagtttatctattccaaaattcaaaattgaggtgcaacactaagcgttaaataaaaagactatgacttaacttcattgttgtacttaatttaacaatgaatttttttcaatctaatgttattgtcccaaaatatgtcgagctcgattgatcatttctgattcattacattctgaagccacaccgttgtatcctggaaaaagggaagcggttgtgtatccatttgtgttaacaaaggttaaaagtttataggcttccgaaataggcatttctattttatataaagcaatttcatcaccagagtaattgtcctgtaaaatttcatttaatggtgttctatcaatgcgctttttatacatatcttcttcattaatcggatctgatttccaataagaaagtatgcccttttgagtttttaaattaggattatcaatatacggaggaataacaaactttagtgatttatttacagatgacctacttaattcatcataattcaaagcccaaatcaccatacttttatctgaagcaccagtatcacaaatattatttaatgcatttacagcagcaaaataaaatgcaacattaaaattaaatgtccaatctaagagtctagtcattactccataatgctgtgctaatgctgcaacattttctaagtcatttggtatccaagacttattaatcacgccttttattaatttgtctattgcaaattcgtcaaaagttgagactgtatcagtagggtatatctttaagccattttcattagacttaagataaaaccgtcttaatagttcaagttctgccattcgttgaaagaattcatattctcttttatcagaattctcactatcaccactagctatttgcaataacttttcttgattgctctttcttaaagctgatggtaataactggtactcattgctaccttcacctcgaaaaatatatccactatttaaatttttaagcttaccactatggaaatatatatcatgcaacatattttccatagtggtatattttgcatttttaattacttcaatatcttccattatttttactattcctatatcactaatttatcaacaataacaacatcttaattataatacaccaatagctaaaaacaatttaacgcaaagacaaagatcacttattacactgtgcataatcaaccatgaaaaagataacatctatccaaattcaacactaactacaccataaaaattcccataccattttgcttttctcaaccgtttcacaccaaaaattctactatatcagtagctgaatgcggtaaaacaatggacataaatcaacgtatcgaggattttcaaagtgcgatcaagcaaaatcaagacattacccagcaattaggcggtacattgcctatttaacgaccaataaactaaacctaacttttcaatttgacaaataatttctactcattcttgctatggcgagactgtaaaatagtttgtgtaaggatgaatgattccttaaatttatttctttaaacattagaaaaaggagttcctttctcgtatgattggtttgaacaaaaaaacacatacagaaagaagaactccctcatgaatgattttaccaaagattttgctcaagctctattcaatccagacaaaataaatgatttattgcgcaaagagctacaacaggctgttaataacttgctagaagctgagttgactgcctttctaggctatgatccctatgccagaaatggctggaatactggcaattctagaaatggtgcttatttccgcaaggttgatactcagtttggaccaattgaagtgcaagtgcctcgagaccgcaacggtcagtttcatcagcacacgctgcctgactacaagcagcactctgatgttttggaaagcacgattatcaagctctactccaaaggcgtaactaccagagaaatcgctgacttgattgagaaaatgtatggcagtcattatagtccagctcaagtatcaaatatttccaagcagatgctccccaagattgaggcttatcacaagcgcaagctaagcgacaagtttttctgtgtctatttggatgcgacataccttcctttgcgccgagaaacgtttgagcgtgaagcagtatatattgccattggcattaaacctaatggacataaggaagtcattgactactgcattgctcctagtgagaacattgaagtctggacagagatgcttcaaaacatgaagtccagaggcttgaagcaagttgagctttttctttctgatggtgttgttggcatgaaaacagccttggccaggacttatcctaaagctcattttcaacgctgtttggttcatgtcatgcgcaatatctgcgctaaagtacgcgtcgacgatcgtgaaaagatcatgaacgaattcaaacaggtgcatcaacagacaagcaaaaaagaagctgcagctgtcttgcacaaattctatgccaaatggaataaagcttatagccatgtcatcaaaggtttgaaggaaattgagcccgatctgctggtcttctacaattatcccaaacaaatcagagcttcaatttattcaaccaatatgattgaatcctttaacaacgtcatcaagcgtaaagctaagcctaaggcagaatttccaactgaacagtcgcttgatgcttttattggtattcaggcaatgagctacaatgaccgttatttcaatcgaattcataaaggctttggtcaggttcaggataccttagaatcttattttgaataaataataaaaaatcaatttgcgagaaagaactatttacacaaaagatttgacaggttctgctatggctctcaaactcaatttaattttaaacaaaaaataagagatgaaccacaatatcatcacattatagttcatcccttactttaagttgtttgacaaatagctgactagtatttattttccaaaaagtgcacctatcaatgccccaattagtccagcaacaatagcagttctcggcttattgcgaccatctttcttaagccaccttagtatagaataaaatactagtaatattgtgtaccaaatccaccataacacggcgaaaacttccaatgcagttcctatcccataattatcaaatattaaatcaataggtaaagcaatcaaaaatatactaattacaaaagttaatcctaagtatactattaatgcattggatctttgcttgatttctagtttttttgtactttcattttttataattgacttaactccaaaatataaaagtactaatcctaatccccaaacaagaaatgctcctccctgattccaattcttaacatctatatgagcatatgcataataaatatcttcattagcacaaagcttatgctgaatgtatttatggaataagcaatacaaactcgtacctattgagcttaaacacccagaaataaataaaatctttaaaagaaatgcattatttttgaaaaactcagttattttatccattctattactcactttctcatccttatctggagctataatttcaaattccaagtatattaacttagaatttttctcatcttccataacatcggcaaaaggtcttatagtcaaattcagatatttctgctcttcatcaattccttcatacgataaatttaaatgtaattgaggaaaagattcgatctttttaaacagattatcactattttctttagttacatcgagatctttaaaattatcataaacgtaatttcgtaacatggatatataaaagcttggtacatacaagtatgttgacttatcgcttcctatgtaagtatctatttcagcaaaatatgactcaatagttttgatatggtttctagcgtcttttaatccaatatatatagttttatcatcaaaattataatcgtcatatcctatcttcttaagtctttttgcccaataatccttattatcaatcttggctacaaccttcttagctgcaccttttcctatattaacaactttaaactttaaatcagaaatttttttaaaatcctcattgttgcctttattaaaatcaacaatcgatttagtaatttcattagacacaataatctctggttcatcgtgtttcttagacaataccaattgccaatatgtaatactaactgttactattgctatcaaacacccaaaccacggagactgtaaaatagtttgtggaaggatgaatgattccttaaatttatttctttaaacattagaaaaaggagttcctttctcgtatgattggtttgaacaaaaaaacacatacagaaagaagaactccttcatgaatgattttaccaaagattttgctcaagctctattcaatccagacaaaataaatgatttattgcgcaaagagctacaacaggctgttaataacttgttagaagctgaattgactgcctttctgggctatgatccctatgccagaaatggctggaatactggcaactctagaaatggtgcttatttccgcaaagttgatacgcaatttggcccaattgaagtgcaagtgcctcgggatcgcaacggtcaatttcatcagcacacgctgcctgactacaagcagcactcggatatcttggaaagcatgattatcaagctttactccaagggcgtgaccaccagggaaatagccgatctaattgaaaagatgtatggcagccattacagcccagctcaggtatctaacatctccaagcagatgattccaaaagttgaggcctatcatcagcgcaaactcagtgacaagttcttctgcgtttatttggacgctacctacgttcctctgcgccaagaaacgtttgagcgtgaagcagtctatattgccattggcattaaacctaatggacataaagaagtcattgactactgcattgctcctagtgagaacattggagtctggatagagatgcttcaaaatatgaagtccagaggtttgaaggaaattgagcccgatttgctggtcttctacaattatcccaaacaaatcagagcttcaatttattcaaccaacatgattgaatcctttaacaacgtcatcaagcgtaaaactaagcctaaagcagaatttccaactgaacagtcgcttgatgcatttattggcattcaggcaatgagctacaacgaacgctatttcaatcgaatccacaaaggctttggtcaggttcaggacaccttagaatcttactttgattaaataaaagattaaaaaatcgatctacgagaaaaatctatttacacaaaaaatttgacagtttcgagcttttactattatctgtcgctttcatcaatttaataatgtcatctctataatttatcattttatatctttccttattgatttaatactaattttacgctatttaatttatatattcagggcttttcaaattaggcttcggtaactgcgcaataaaaaataggtctaagaaaaactttcttaggcctattcttttgatgagtggaaatcactaccgataggtataattactataatgtgttagaaatcatactagtttgagtttaatgttttattgaactatcaaatttactgaggggtaatcaagcaattcgatagtctatcttttttaagctaattaatttatgaattacacttaaagttacaggtgcttttcttttaagaagttatataaggtcttatatatatcgtactcctttcttaaataattaatttgttctgtatcagtagttggtttatagttgctgatcttagtatacaaatcatgtttaccttgagttaataagtaagccccagctgaaacagcttgatcaatgtctattgcattaactggtaatcttaacaaatcagcttttaattgaagccataaaggatctttaattgcagggccaattactttgatttggtttaacgcaacattattaaacaatgattcataagcttttacgaactcaaaagttaaccctaagaacaatccaaatactaattcttcttttgtcgtttcccgatttattccgtaaatcagtccttcactagaagttgatttatatggggcaccagatccattaaagtgtggaattataagtacctttgaatctaacaaactatgattttgataatcattcatagcttgttgcattagatccatgaattcattttcatttaaattaaaactattcatgaaccattcaattgttgaaccggcagacggcattgcagtaaatctagtatagtgttcgccatcagtataaataccatttgctagagcattttgctctgcatgtttagaaaggtcaggataatttaccaggcacatcattgcttcagtcgttcctgtggaatctagcatttggttttcttctaatttagcgctattagacccaaccatgtgatcatggccggcaagagatactacgcagtctgcagccaaataatttttgagttcaccgacaatattacctataccctcaccagatttataaagtttcggaaaagaaatattttcaatatgcattatcttttttacatcactagaccagtcttttctgcttaaatctaaacataaagtccgactagctaatgtatattcacttgcaaatttacccgtgagtttaaagacaagatagtcaggtacacctaaccagacatacttacggttgctatcaggagggagaaatgacttgttatacttgagcaaccatgctatcttgcaagcagaatagtgagagtgaacatgtaaaccagcaattttatagataatgtgcttatcttggggagagacagaatcggcaattacttgagatcgctcgtcaaaccacgcaatacactcacctacttcttcatgagtcttagcatctaataagatgcctgattctccaaaacttgcaattgaaatttgggttacattatttaataaatctaaattaaatgactttatcgttttcacaatgttagcccaaagtctttttaagtcgaaatccgtctgatcattattaataatttttggcgttttaaacttttttaaattaggtttttcttcattccataaagtaacttttgtatttgtagtaccaagatcaatagtaattctattggtcattttcgctacctaatacctccttcttggttgccttgtagatgaaccaaattaaaagtccaacaataggaatcaaaactaatgcgaaccagttcaattggaagatcttaacaatccagaatcttaatgggttaccaccatcaaggaatgcagtaatgactgagtgttgtgcttgtgcaaagtgaacaccacgagccatcttagtaataattggagccattgcacttgaaatgtacaagtcaccaataatacatggaattgaaataattaaacctctaaatacgttacccttgcaggctaaaacaatcattgaacagaacactgccaagtttgataagtcggctaatggtaaagtattgttacctggaaggataaatgccaaaactactgcgataggagttaaaagcaaaccagttgaaataacagctgggttaccaatagctacggcaatatccaaaccaataaacaagttcttcttgtctgggaatctcttggtcaagaacttttgtacagcttgtgaaataggcattaaaccttcaagtaaaactctagtcattcttggcaacaagagcataacaccggctaagtttacaccagtggttaaaaccttagtgaagtcatatcttgctaataaaccaaagataatacctaagattaaaccaatcatcattggttcacccattacaccaaaacgcttttggatcttttgtgggtcccagttaatctttctaacaccaggaatcttgtctaaaatccagttacctaacaaaccaattggccagaaggttgctgatgatacagttggcaaagaaatacctttcaatccaaagtacttctcacccattggagcagcccagtcagctaacttgaagatgataacagcaataatagcagctgctaagatacctaaccagaagttgtctgttacgtagtaaactaaagtaccagctaaagcaaagtgccagtagttccacatatcaacatcaacagttctagtcttgttagtaacaatcataatgatgtcgattaaaattgttagaggaattacgaatggagcaattggaagtccccaagtaatagctgacaatgctggccaaccaacatcggctgcagataagtgcaatccagcatttttaaccattgcttgcgcagctggtccaacgttagcagttaagataccaatgattgcattgatacctacgaaaccaataccaactgttaaaccagacttaaaagcttgtccaggcttcatcttgaaacaaatacctactatgaataagataataggcaacattactgtggcacccattcccaggaatgcctgcacgatattatttacttgtgatgctaccgcgcccattttattcgcctcgaatttccatatattgaacttacttgttcaaaatgtcataaacttgcttcaaagtatcttcttcaccaataccggtgattaaagataaagcatgtacgacaggaacttttagatcatatggtacttgagtggttgctacaacacaatcaacttcatctgggtctgccattgacggaagagatgctacattagtttgtgtgtaagtaacattgtccattccttgatccttcaaatattgcaaagtcttttcttcagcaacagttgaagttgcaataccagtagcacaacaaaataatatatttttcgctttcttatcagccatgattttaatcctccaaaatagctttagtaactatatcctttatttctttatctgaagcattctttaacttctttaatgtttcttgattttggaacacggtcattaacttcgaaagaatattcaattgtttattagattgtcctaaggccaacatgaaaacaattgatactttaacaggagtatcatcagtacccataactacttgttctattggttcctttagaataccaatagcaattgcgttatgattcgtccatttagcgtccgtatgaggaatcgctactccaaatggtttagtaggtaatccagttggaaatttcttttcacgagcaattacatgatctggatactctttttttactaagcctttttcaatcaaagtgttacccatcgttttaacaacatcttcaaatgtagttggatcattaaaatgatggatttgatctgtttcaaaagtaatttgatcttttgtaacttgcatttttaatccctacttactgattaattaaattaatgaacttcttgtggtgaaagtttgttcataacattaatcttgtgatacacaacatctcttacagctttacgagcatcaagagtacaatcaatcaaatcgaaacgatcttttctttcttcgtagtccttacccaatgcttgaatataagccttacgtaaatcactggcaacattaattttaactacaccatagttgaccatttggttaatttgttcatctggaataccagatgctccatgtaataccaatggtacagggcaaatatcttggatctttttaagcaaatcaaacttaatgttaggatctagattcaatccgtgtacatttcctactgcaacagccaataagttaacacctgtacgctccacaaaatcaactacctgatcaggattggtgtacttgttatcagcacgtacaatatcatcttccttacccgcaatagcgcctaattccgcttctacaggaaccccatagcctttagcaaattgaactgcttcatgtgtgtgcttaatattctcctcataatcaaaacgtgaatcatcagtcatgacagagccaaatccggcttcgcatgcagctactacgtctttaaaagacttaccatgatcaagatgtaaagttaccggtgtttccatgtgatcggcatatcttttgaccatgtcataaatataacgataatgaccatcagataacttaatattggttggggcaatctgaataaaagctggaatcttgctcttttcaacagcatctaagatacccatggtagtaattaagtcagtagtgttatatgcaccagcacaaacatgttcacccttaataatatctaacaaacgaaaaccattaactaatggcattttctaatacctccaaacgattaaacacgctgtgacgtagttgtaagtagatatttatttcctttaagccagactgtaccaaattcaacaggatcatttttttctaaataaacaatctgttgcatttttaacactgggtcatcgctattaatttttaataactttccccgtacaggtccaaccttaacagcttcatatgtactcgtagaagattgaattctttccttagctaatctctcaatttctacaaataagcttttctttgtaaaattagtagaaactatttcaggaattcgttggatattaattctgttttcaattaacataatgctttcatctttaacttttctaatacggatcaaataaagatataaagctcctttttcaatgttaagatttttagcaacctgagaatttgcctttcgtagttcttgttttattacgtttgtggtatattctatatggtgagcttttaaaacctcagcaaatgagtgcagaccaacatccaaaggatagtcaatatcgcgttctgctgttgatacgtaggttcccttaccatgacgtttatttagcagacctctatttgttaagattgataatgcctttctcaatgttcctcgactcacatcaagctgttgtgcaaagttctcttcagactccaatttctgtccaggttctaaatctccgcgatttattgcatcctgaatttcaacaacaatttgttgatagataggaatgacggagtctttttttatatctaattccaactttgccatagccaaaaccttcctctatacacagacacttcgcacacactaaatctatatacgtctatgtacatctttcgtgtgcatactcaatatacgccctttgcatccaccattcaagcgcttacaaagaggatgaacaagttttgtactactctccatagcacaaacacaaataaaaaatattttattgtacaagctatctggcttagtcctcgcaactgtatcagtctccattagttaaaatatgccgtactggtatgttgtttcttatatggctacatactttttcgttggtatcactgtctcaagcttttgtattataaatctattccgatagacattttataaataaagttatgtgtactatgtcttctagcaagattagatccaaatagcgactttcattaatctaagtaaattaaccgtaactaaatagattcactccatatttttcaaaaatactattaattgaactagctacataaagcgctgcttacttttaaacataatcttaaagcagtgcttaatggagtagcgctaacacattctaacagctgcctagaaaggcttcaatcgcaaaatcaaacaaattgagcgaacagtttttggctactctagctttaccaatttcttaaccagaattcgtttagaggaaaatctgtataaagaaaaagaaccaaccagccttttattagctgcttgattctattcatttactgcttatcaacaggatttcttatagaatatcaagacaaatatattaagaaaaaagagtatactaaaaatactctaaaagactagtcttttagaagtttttaacaaagagcttttaatttaggcaattaaatcagttcctataattttattcatactaaatcttttaaatctacaaatccccacttaactaactgatccataaaatttttaacagtgtcatgggtatccagtaaattgtattctgctacaccttcagtaaataacaaatttttagtagtagtaagctcatacaatttactaggaaattttcgtttggcaaaatagtcatgccattgttttaattttttgctcttagcaataaaatattttcttacagcgagtaaatataaataatggatttgattatggtaaacagctatatacttttttaaataaatattattgctatctttcaaataatcttcaggtaactcaaccttattcaaaaattgtttatcattcatcaaattctttatatccaaacgatagtctacaaaatctgaagaaaatacacataccgaatttattggtacatacattttatgttgcacataatttcgtaagttatagcagattctataagcaatacttgtagaatataaatcttttctaattccatcccattcatcaaaataatctggaacatttttctttatccaatttcttgttgaatctaaaaagacctttgcatctgatacataatctaatattaatttattaccagcatctggagctctaggtggaaaatgaggtttttgattcattaatagatcaaatgcttgattttcaatatcaaaaattgaatatgctgcataggctttatgtctaaactcagcaaatttatccataatttttctatcctgattagtaacagaaacttctacagtgttgtttttattttgatcataaaaaatttgcagcttaatcaacttattcattggataatttgaatattcagatataattttattaattttagatacagtaagtttcgaaactgtcaaatcttttgtgtaaatagttctttctcgtaaattgattttttaattatttatttaatcaaagtaggattctaaggtgtcctgaacctgaccaaagcctttatgaattcgattgaaataacggtcattgtagctcattgcctgaataccaataaaagcatcaagcgactgttcagttggaaactctgccttaggcttagctttgcgcttgatcacattgttaaaggattcaatcatgttagtcgaataaattgaagctctgatctgcttgggatagttataaaagaccagcagatctggttctatgtctttcaagcttctgataacatggctgtaaaccttgccccatttggtatagaagtcatgcaggacagctgtggcttcttctttgtttgtctgttgatgcacctgtttgaattcgttcatgatcttttcacgatcgtcgacgcgtactttagcgcagatattgcgcatgacatgaaccaaacagcgttgaaaatgagctttaggataagtcctggccaaggctgttttcatgccaacaacaccatcagaaagaaagagttcaacttgcttcaagcctctggacttcatgttttgaagcatctctgtccagacttcaatgttctcactaggagcaatgcagtagtcaatgacttccttatgtccattaggtttaatgccaatggcaatatatactgcttcacgctcaaacgtttctcggcgcaaaggaaggtatgtcgcatccaaatagacgcagaaaaacttgtcgcttagcttgcgtttgtggtaagcctcaacctttggaatcatctgcttggaaatatttgatacctgagctggactgtaatggctgccatacatcttttcaattagatcggctatttccctggtggtcacgccattggagtaaagcttgataatcatgctttccaagatatccgagtgctgcttgtagtcaggcagcgtgtgctgatgaaattgaccgttgcgatcccgaggcacttgcacttcaattgggccaaattgcgtatcaactttgcggaaataagcaccatttctagagttgccagtattccagccatttctggcatagggatcatagcccagaaaggcagtcaattcagcttctagcaagttattaacagcctgttgtagttctttgcgcaataaatcatttattttgtctggattgaatagagcttgagcaaaatctttggtaaaatcattcatgaaggagttcttctttctgtatgtgttttttttgttcaaaccaatcatacgagaaaggaactcctttttctaatgtttaaagaaataaatttaaggaatcattcatccttacacaaactattttacagtctctaagttgagactgtaaaatagtttgcggtgacgcttagctccaaattaaaagaagccaaatctattttaggacttgactccaaaacaaaaagaccagtagtttgatgttaagcaaaaaagccgttactctaattaggcaaagaataacaactttttcgtttcactaaattttatagttattaaagctaaatgtattggctacagactagcatggagcaccacttgtgagtttggcgcctacgacgatgacgaaaatctagtctctattaatcctatattttaaactgtctaaatttttcaaagcctttttaatgtttctgagaaattaatactggcttcttcagcttgctgagctaattttcctggtatgcgagtatttttcttaaccatcacaggtttaactttcctagctgcagcgtccaaatctgtagctacaggataaatatgtgcatttggatatttctctttacaaaaagcaattacctcataattggagtaggttggggttattcattatttggtacatcatacaatgctaatcctagcgtctgctctgcattacaaagtgcctcagctaagccatggccctcacttaatgcaccaggaacgtcaggaaattcaacagtgtaataacctttttcgccattctccgtatcatctaaaacagcaggatacactatagttctcattgtaatcacctcagcataattatggataaaaattttttagattttttcaaagaaagatgtacccggatttaaaattgaagtgcaacactaagtgttaaacaaaaaggccatgaagacctaaacttgaagtgacgaaaaatcaagaaaggaagatctttatgaccaattcaaattctagcatttctaagcactatcatcaattaaccagcgtacaacgtggacaaattcaagcaatgctggattccggcataacttcccgtactgttatcgctcaagaagttggctgccataagtcgacaatcagtcgcgaaatcaaacgcggaagcgtcctgcaaagagacagcagctatttattgtatgagcactattacgctgatactgcacagatttattatgagaagcgtcgcaaaaactgctatcagcgcaatccattgaagcattatgctgtctttttgagaatgctctccagacgctttaaagctaaatttgatgccaccagcatcgatgagttcgttggtgaattcaaaaggactatgccaggctacccttgtcccagcacaccaactgtctatcgctatattgatcagggcttgctggacataagcaatattgatctgcctatgaagctcaaaagacgcaggaacaagcgtcatcacagccatggcggtcacgctttgcacaagaagcatcttggcaattccattgaacagcgtcctaaagagattgaagacagaaaagctccgctgcactgggaaggagatctggttaaaggcgtcagacgcaagaatcagcctgctttaatgactttgactgaaagaaccacacgctttgaagtagttatcaagattcctgactatcgggcaagcacatgccaaaggctgcttcaaaaggagattgacagacatcctgcctggtttaaatcaatcacgtttgacaatggctctgagtttgcggatatgaccaagatcaagggctgccagatttactttgctcacccatattctccatgggaaaggggcaccaatgaaaactgcaatggtcttttgcgtcaattcttccctaagggcaagagcatgaaagacaagtcaaaagcttatgttcaacaggcaactgatgccattaaccacaaatatcgccgaatcctccaatatcacacagcagaggaactcttcaagcaatatatctcttcataacctaactgttgcacttaatttgacaattcaggaaagaaagatgtaatatcaaggctttataactaattatggattagtttatgttgtttatccataattttatctattttttgctctttactaaaatccaaaatccgctttctttcatagacaaagaaaagctaggaatcatgcactaataagcgtgatttctagctttcaaccttttgttactctaacttttatttcggcatcctactttcataatgtgaccaagctgaccaaatttttactctacgttgctttttaacgaaagcattttacaaaatctatttatcaaaaaccactttatatatcttacgcgtggtgctagttaagtcgttttagttaataaaaaagtccaatcggattagactcaagttgtaacttaaattaaatagaaaagagtctgatctaattgaactatctcaagcttaatcgtttttctcaccatttacaagttagctttgctcggttaaatgtaatttgtcgttccttgtacaagttttgtgctcctgatgaattgaagcaccgtaaaaatgttgatcaggttaaaatttctgacagctccatcttagcgatgcttatttggcaaactgaaattggtatcgaatctcaaagaagattttgtaaattctttgtcggtttgtctcattctcgctttaatcgtcgggcacgaatgcttttgcctttaatgcgctgtatccgtcaagattggaatcaagaagtaaaaacagctggagaattcttaatcattgacagcttcccagttccagtttgtcagcccatccgcaactatcgcgtcaagatctttcgtggcatagctgatatcggctataaagccactaaaaaaatctattattagggcttcaaggttcacgcgctagtaagtgatgacggctatgtgcttgactacgcagtcactagagcatcagtgcatgatgccaaagaaacagtagaattgatgattaatgctcatccaattaaccattatcttttgggcgatgaaggctacttaggaaaagatttagctgccgagttaaaaggtatgggctatgtgctttggacaccatatcgaagaaacatggaaggcgctaaaaagcataacgatcatcaactgatggcaattagaagaacaattgaaagcgacttttctttgctcagttactataacgctgaaaataaccgagcaaggagcttagctggttttcagcagcggctagaaatagctattttagcttataatatggcatattgcctagaacgatttaactagcaccacgcgtttgaaattatataattttagtttactaatatacatctataccatcctcctaaacaacttctagtttagcaacacccaacataatacatgggtactaaaaaaaacgccaagtcgtcttattccacggccctacatcccagtctcttcatccaatctagtgtacattatgaagtaaagttccttagccttccgtcttaaaaatctgcttcaactcaggatgccctttaagcaacctatcgcacccatttttcattaatcttattctttactatttaatgtttccggttaatctcattatgacaaaaaatgtccacccaaaacaaaaaagccagcattccagctgaccattttattcgaataattatttcatcaattttgcaatacttcttgattgataaaatctacgaacactatttggatttttcaaaatcaattgttttaattttctgccatttttagttacgctggtgattcgcaaacctcctccgaaatcattatcaccaagatctaaccaaaaaggatctatccctaaatactcatgcccttgatacctatacttccatgatgccatccagtgatgatcactcgcatacttgcttgcacgcttttgatacttaaaactcttatcaaaaaaagttttatcttgctgatataaagtgtatgtgccatgtggaacctgcttcccaagaaatggtaaagtaatagtatgagaagcaatttttattttattcaaacttctaccataatcatatgtataccatgtcccgcgcatggccttaggcgttgtcactctactgccatgggaatatgctgctgcaactttattagttccaagcaatgcacaagatgcaattgcaataaaaaatataatccctacttttaatttcttcataaaatatcctctcaaaatatttttcaacacacttttcattcatactaaatggccagcatctacgctggccatctttgattataaaaggttgttctccaatattatacaacactacattgctgttaacttaacttttgtgccaatttcaaaatatacttgcgcagatcatccttggtttcaggatggttcaaaccgtactcaatcgaagtttcgagataaccttccttgttaccaacatcatgtcgctttccattgaacacatgggcaaataccctttgcgtcttgttcaatgtatcaattgcatcagtcagttgtacttctccacctctaccgggcttggtttcagctaaaatgtcaaaaatttttggtgtcagtaaataacggcctatgattgctaaatcacttggtgctttatcaatagctggcttttcaacaaaattcttcacattataaagactgtcgttgaccttgccatctggcgcaatgacaccatactttgagacttccttgtgtgggaccttcattacagcaattgtagaagcatgaatctgctcatagtcattcagttaatggaatttaatcatccatcagatcatatcacaataaataactcaaccgctacggaacttttttgcccgataaattgcattataaatctcatagcttatttctttaattatttgaatttatttcattcatattcaacatacttcttttataagcatataaattagataagctttttcgtaaatgataactttgataaattcgccgattgtaaaattaacttgaacactttgtagaaaataaaaagtccatttggacctgtttgatagaatgttaataaccacaaaaacatctatggaggtcaaaatggactcactacattctatcatggacaagcgtaaaaaaggaacacatctattgcttgaagagcgggttattattcaaactcgtttgaaagatcattgttctttgcgttccatcgctcgagaaattggctgttcccctagtacaattcactatgagatcaaacgaggggctgttaagctgtatcacggtaaagttaaacgttataaagcccaacaaggtcagagtgtttatcaaaacaatcgtcagcactgtggtcgaaaatctgactttctcaaaaagcacaaatttattgattacgttcaacggcacttctttgaagatggctggtcactcgatgtctgcagtaatcgctgcgctgctgtggatgaatttgccagcagagatattggctgcgccaggacgctttataattatgtcgatcaaggtctgctaagcatccacaactacgatttgccagaaaagctcaaacgcaataccaaaatccatcgcattcgcaaaaataagaagaagctaggccgcagtattgaacaacgaccacaggaagttaataagcgtgatgtgtttgggcattgggaatgtgatcttgttttaggccataagaccaaggacgacgaagtgctgctaactttgtctgaacgcatgagccgtgagttcctaattattaaaatcccagataaaacagctgccagtgtaatgaatgcctttaaaagtctgcgcaagcaatacagcgagcattggaacgatatctttaaaactattacgactgataatggttctgaatttgcggatctatctcagctggaagatatttccaaatcactagtttattatgctcatccatatacttcttgtgataaaggcactgtagaaaggcataatggccttattcgtagattcattcctaaaggtgactatattcataactactctctccaacaaatcattaatattgaaacttggtgcaattcattgccaagaaagatcttggcttatcatacaccagatgagatctttgaaagagaattagatcgcatctatcaaacagcctaaacaaaagtgttcaagttattattgcaatttacgaataaataattaattaaaaaaatcaatctatgagaaagatctatttacacaaaagatttgacagtttcgttttattacgcaagtatcctctaattaaagttaagcaatcatcttttccataatatctataaagattattttttacatactcattcatattgaatttctcccaatatgtttctatcactgatatacattcaattttttaattatgtagttacccctactaaaaaataaccatgtcaagattaatctaaattaactaaaaatcattaattaacattactgtctactcttccaaatcatcttagctctatcaagtaaagaataagcatttttattacctaacagtacaagtattgcaccatacataatgacagaaaggattactgaagaaatagttttaagaatcaaagatgaaaagcctaaattacatagtagacatacaattactattcctatacatccaataatagaatccaataaattttttagtgtatctttctttaaaattactggcttaataatatcccaacatgagtagccattcataaccataacagtaaattcagccactactgtactaagtgaagtaccatcatatgacataaagggtattaaaataaaattcaggactatattttcaactgcagttacaattgtattgcgtaagactaaattttctcttttagctggaattaatacacaatctgagaagatccaggaaaaaatcgaaaaaattattgcccatgcaataatgcaaagagaatttactgatggtaaatacttttcactagcaataatcaaaacaacttccctactaagcattattaatccaactgctgcaggcaagacaagaattcctaatgaactaataactttagataaaacctgattgtactcatctatacgtttttgtccccataaaaatgctaagcgtggaatagtaactgtcagtaatgcagataaaagattttgtgctacctgatagatttttactgacgtactatatatacctactgcataatcacttttcaataatccaagaatcgttgtatctgaagcaacgtaaatagtaactgccacagcagaggcaaaaattaccaaaacaggttttaaatgatgtttccaattagttttagtcgttaatttaacatgaacaaaacttcttacatgaataaagtttagtaaattagatcctacagctgaaaaaacagtaatggctgcatatattaaataatcttctggtcgtttaaccaatataaataataaaataatagacatcactttgaagactatacttcttacagttatatatgtataatcctcataaattgtataaatccattctgttcctaatgtggtaaataatatttgtaagctaaaaattaatatacaagaaacatagttatgtaagtttttaaatatcaataatgatgcaaataataatagataggctattattgttgctataatatttaaactaaaaatttggcttgcaaacttatctattttttcttgattttctcgatattttgcaccttcgcgcacagcataagtagctataccaagacccgctattaaaatgaagtaacttacatatgtattagaaaaattataaatacctattcctgaaaccgataatattctcgtaacatatggaaaagttatcaatggaaacgaaagatttaaaacacttctcaatccattaagaaaagcattcaatcctaatgattttttcttcatttttattctttcttcaattttgaccaagtacaatcttttacttggtcccacgtttgattataaatatcattttgtttcaaaagatttatcctttcatcgtcaaatctttttttaataaaatgggcaggaactccaccccatatttcataatctttaatgtgtgtgcctttagttactacagccccagctgcaattactgctccatttcctatcgttgcacctgataatatagttacattatgagatataagtacatcgtttccgatctttacctgtttggtttgaattccatcacctaatacaggactagacaaaggcttagctatatcatgttctgcaggacatatacttacatgatcagatatactacagtaattaccaattactgtattttcaatccatgaattaacattgatatacgatccatatccgatgcttacattttctttaacaatcgtattttttcctacactaaccatattgctatatttagcatgaacagatgctttagtagacattatgtttgtatgatttagcttattttttatgctccataaaataatttgctttatattatgtaaaagattttttagatacaaaactatcattttttaccagatgttataaaatgttttcctttctttaaacttttaaatagattgtacttaataaacaaagaataagttgatataccaattaacttagctagttttttataagaataagattttgctttaccaacttctacataattataaagatatctaaaagtatttctaactggttctaattcaagtccaagctttgttgtataaactaatccattaaagttgttcatatctctttttaaactattcttagttaatccatctgagagataatcaccaacataaataggaaccatatgccatctaataatataaccatccgctgctatcttattccatacggtcccttccgtaataaagttttcatctttaaatattttaaatggatatttttttaacaaattagttttatatatttctgccttatccccgcctaaattaaatttctcacgttctaaattagtagcatcaattattaattttccatttcctctcccaccattaattttattatctgggtattttctcagacccgctacacctgcgaaattttgagaattagcatcatgttcaatatcatcacaccaattatttattaaatcaaccgcatttggtacgagccaatcatcactatctacgataaaaaaatattttccttttgctaattgtacggctttatttattgctcgaggtttaccaccatttttaaccgttatatatctaatgtcatattctctgtttttctgtgcaatattcttgtttatttctttatcagtaccatcagttgacccatcattgattattatccattcaaaatttttccttgtttgcgaatcaattgaattaaacaatctagttacatacttttctctattatatataggtgtaaatatagtcaaaaacatgaggttctcctctttttaattcatttcacggccataactcgatttaatttctaaaaagcataaaggaaataagatacagcaaattggtgaaaaaacgattttttctgtaaaggcataaatcaaaaagattacaataattactaattcattatatttgttttgaattattaccctttcgattgcaacacatagtattaacaaaagaattattgtttgaaaatatcctatacctattagaaaattcaaatacccattgtctaaataatttgttgtaaaactaccatcgttcaataacacattaattgtttcaatattttgagggaagaattttattccatattgattcaaattaaaattccaaaacaataatctattagataacgccttattaagagaattcatccagccactatctaacgtaaatttttcacctaaaaacatacttacgattgctagaacaaatgataacgtaactgtcaatttattctttagcattctcttatttaatacaattactaaataaataattgacaatatcccagctgttctatctttaacaacaaaaaattctataaaaaacaatattaataaaataaagacttttattatttttttaaaatcactattcaaataaaaatacagtaaacactcggaaaatataaaaaatcctattgcattcttactagtaaatcctaaatttgaaaagtttattattcctagaattccaaacatagcacttactacaacacctataaaagtggagcaaaaatatatttttactaattctctagatgaaaaattaaaggcagaaattccacaaaggtacaataaaacaatactgtatgacttaaatattaaacttaataccaatgaaaaaaatatcaaacctaaaaaataaaatagttttgatgaaatacgccccattctgaaaagatttataattgcatttactgcaattataatagctaaaattagatctattccagataaagttgtactggaaattactgtatttaaatttgatgtacttaagatacctataacaattaataaaaaatatgcacttcttattaacaaaaaatctaacgttttcttactttccataaattaataccgatcattaaacaaatatttttttaaataatatgatgttgcttttttaaatcctattccttttatcttctcccttaagtttcgtggctttatatatatatcggaaataataatccctatctttactccaaagatttttatcatttttcttctaagtaattgcccatacctatccttatctgttagccatgatcctaaatataaatgaattcctacagtattagaagttactttcaattgaacagtttcaaaatttaatggacaaaaatattcaacaggataaatattaaaaccatctatatcttgaaccttatttacatcttgtagaccatcttttatcaaacgacctgtaaatcttgtgacaatagtttttttattatactgattattttttaaaataaaactttcagctttatactcttcaagtatatcttttattaaatcattattactatatgttgccatacctaatccaggatttactttaataggatataaactttcgcatgctaaaaaggaacctttttcaattattttatctaatccttttataagctttacatcagtatctaaatacacaccaccatatttatttagtacatatagtcgagcataatcactaacaaatgcccattttttagctttataagcttctttcacatacaatggagccctatttatttgaaaatttttttcatcccatctttttatttcataatcaggacaaaacttcttccaactctgaatacactctctcaccttatctggaattgggctaccaccaaaccaaaaataatgtattaccttaggtatctcattcatattttcttttccttaatttttgagttcttaattcataaatcatcttattaggtaataatcccataactattggtttcattatatatggcacacatttaagaaacggtaagttcatttgcttatatccataagctcgcactttagccgtataccaagaatatttaaattgaccatattttttattttgactttgacttataaaatacacatacaacggtttttggatattgtatcccttcatacctaaggcatacattcgcatatataagtcatagtcctcagctcgcattgtttctttgcagaccctatagccattggacctttttaaagcctcagttctaaacatagtacaaggatgcaaaaaaggagaattccataaaaaacttccctttgatggtttttcttccatttcttttaatctatatttattaacaccatcatctatataatatgcactagatacaaaggaatattctggatgtttttctagaaaatcaaattctatctgaaacctatctttatttgaaaaatcatcgtcatccattcttgcaatatattttccccgagcgaatttcaagcaatggtttaacgaagcacctaatcccatattttgtttattggatattatctttattctattatccttcttagcaatttctttcaaaacttgtaaggtattatcagttgacttatcatcacaaataataaattcaaaatttgaaaaagtttgatccaaaatagatttaatagcttccttatatctaggtgataaattataaacacccattattacagaaatttcaggattcatatatagctttccttttataataaattcgaataaaaattatcagcatcatgcgatatttgtttcttatttgtaagtttaaaaatattagtattatgtgatatgactttccactttttcacttcaaatttttcatttaaacacttttgaagtgaaaacaaattaggttcaaatttagaatatctttttgtaatcttggaaaagttactcatattttgactcaatgcataatttaatgcataatctatcaaaaaataatctacaagtttatcattatacttccaatactctttgaaaaaaacattcataaattcaaatatatccaaatgtgatggaccaccaattaaaaagcctgtccatcttccttgtgatacattaaaatttgttttatcttcataaccactgcatgtaaacaattgctcagtatcaatattatctaggttgcctgttacataaagcgtagcatccatccataatccaccatagttacttaacagattaaatctaagaagatctgataaatgtgttaaagtgatttgacctttatctactttttcatagacgtaattcggtagagtagcatatttttttatatttaccttagaaataaagattacatctctctttccacgatttttcaatatgctttcgtaacattttctcgaaagatcagttaacttatcttgtccctgccaccaaaaaaaccatattttattagaatttttattctttttcttcgatgacctttcaacttcactcagagtataagtaaacaatggattaagctctctcattattaattgatgacgtgctgaattatactttcgtgccagagtgctctgccatggcatacgatttaatattttagcaataatgaaactaaaattatgagagtgttttatataatatttattgttcattatctatattttttttccttatctcgtaaaaaataggtgccggtattagaccgataattattggtttaattacatatggaatcgatctatatcctaaatgtaagactttaaatcctccgtaccttactttagcttcgtttattctatctttcataggtcgatactttttatgtttttcattttcaatatcaattctataattaaataaaatttcttgaatgttgtatcctttatatcctttagcatataatctaaaaaataaatcataatcttcggctctacgcgtttctttagtaaccctaaatccatgaacagcttttaatgcatcagctcgaaacatcatagaaggatttaaaaatgggctattccataaaaaatcacttttttgaggcttttctggcaacctaaaagtaccccatattttattcttatcaaaaacgtttgctatcgtaccaacaaatgaatattctggatgcttatttagaaaattaacctctttttctaatctttctttttttgaaaaatcatcatcatcctgaaatgcaatatattttccttttgaaaatttaatacattcatttctcgaatatccaggaccatgatttttcttatagcctattatttttattctagaatcaagcttagaaattctttctaaatattcttttgtttttgaatctgtagaaccatcatcacaaataataaattcaaaatttttatatgtttgatttaaaatcgaatttacgctgtttagtaaatactcatatttctttacattaaaaacagacataattactgaaactaatggcatattaaacctctataaatatctcgactttcttgcgctacacgactaccattaaatttactatgaacacattgcgcagcctttttaactattctatttcttatttcaaaatcattatgtaaagccattacttgatttgcaacttcacaataattatctttctctactaacaatccattttcattatttctaacaatattaggaatagcatccacattagtagcgataataggaacaccacaggccatatattccggtaaaactaaacccaagccttcccagcgagataacagaatccctacatccataatcttcatataagctgtaggattatctacccagccagttatcaagaatgatgaaccgagatcatattgattaatcaaactttcaatctgatctcgtaactcgccatctccaaccatcaagaaaaatgcgttggggattttctctttaatcaactttgcagactttacaaaggtatctggagctttttgtttagatagtctcccaaccatacctacaacaaaagtatcttcagggatacccaattgagctctactcataggagtagtcttctctatctcttctaagtcaattccgttatagatcacctgtaatttacttggcttacagattttttctctaagagcagactctttttctgcatcagaaatgcagacaattttgtcacagaaatgagcagatatcttttctacccatttgtacatttccttcttcttggcagattgctgcatattgaacgcccaaccatgagggttatagataactttattgttcaatcctaagtcagcaatacgcgcaaatgcaccagctttacttgaatgtgcatatacgatatctggctttaattgtttaatgattcttctaagtgttctttcaactttaatatctgatgaaggttcaatatcatgtgccatccttaagactatgactctatcagccaatgttttaaacttcttatagtcatagttttgtgaacatactaagatattctcgacttggtccttactatatttaaaaagtgtttccaaatatctttctaccccacctgcagcttctgcaacgtgaagcacacgtatttttttatccataagtcctcatcaagttttttacacaataaaagtatttattaaataatgcaacttatctaaatcatatcgttaaaattcaatattcatttagctctctcattacctaacaaatgctcttgaacttttcactattaataagctccattcggatgaaccattactaacacagttttaacgatcaactttaaatcttctaatatcccagaatggttgatatacacaatatcaagccaaaccatttcgtcaaagtcagcttcatttcgctttgttacttgccaaaggcctgtacatcctggcatcacaagaagtctttgcttataataatcagtatattcttccacttctgatggtagaggcggacgaggaccaactaacgacatatcaccaattaggacattccataattgtggcaattcatcaagactatatttacgaatcgtatgcccaatcttagtgattcttgggtcatccttaatcttgaacattgccccatcaatttcgttttgatcttctaattgtttaaccatttgatccgcattaacgatcattgagcgaaatttgtacattttaaatggcttgccatctttaccaattcgctcttgcgaataaaatgctggaccaccatcttcatgtctgattcttattattaaaaacaaaaacaacggagataatataattaatcctaatgcgctggctagtatatcaaatactcgcttaactgtatgatatacgggccggccatttacctttgccggattaacctgtagtttctccattagcatcattgcctcttactctcctaattacttagtctacaatactcactttttatattatcacgcttgtactagctctaatacaaatctgcaaacttgcaattagcttaaaacaaccagaacttcttcttgcgcttcaatgggtgccaatccatctgaactgggtcgccattgatgatacttctagcattatcttgccactgctgagctaggtcttgactgaattcttgactcatctttttataagcttcactcaattgatactgccgtcttggcaaatcgtgtgcgtcagatgcaaaggtgcatccctgccccgccgcaatcaacttacgcgacatctcttcaatcttcttgccaaagattcctgtataagaactagcagtaatctgcaccaagcagccttgttccagcatcccttgcaagatctcgggttccttcaagatgcggctattgcgctctggatgcacgataattggcgtcaccccgcgctgcatgatcttgaagatcgtgtcttgcgcataagttggcacatcttcacttggaaattccaacagcatgtaagtaccgtcttcatcacagaacaagatgtcatcgttatcaagcgcatcaattaagtcacccgacaagcgaacttcctgccctgggaaaaccgtcaacggcaccttggcctcatctagcttctgttggtagagatcagtcagccagaggatatcatccttatggttagtataacgcccattcagtgtatgcggcgtacaaattgcatgcgttacgccatctttgaccgcagccttggctaacttaattgaagtgtcccaatcttttgagccatcatcaatgccaggcaagatgtggcagtgaatatcgactaaaaccattattgatcgtcactcttttttctaccgaacaggccctttttcttctcagcgccataaccatagccatacccgtagccgtaaccatagccaccgttttcagctctaatatcgttcataacgtagcctagaattcgagccttagcaaacttcagcatttgcacagctctagtaatcccagccttttgcgtaacactttgacgtactactagaactacaccatcaaggtgactagccaattcttgcgtatcggatacttcaagaacaggaggtaagtcaatgataaccatatcataatgtgacttaaccagttcaataaaggtttccattctacgtgaaccaatcaattcagctggattaggtggaatcggaccagaagtcaagattgacaagttatcaattccactttcttcaactacatcatttaagttaatctcatcggcttctgaagtaagaacagttgtcaaaccagtattatttttaacgttaaatgtactgtgcaaagttggacgacgcaagtcaccatcgattaacaaggtcttgcgacctgcttgtgcataggtgatcgctacgttggccgtaacggttgacttaccttcactaatattagctgaagtaaaagccaaagtatgaatttccttatcaacagacataaagttgctgttagtccggatggttctgaactgttcagatatcgcactacgaggatcagcaactgtgattaactgggcaccgtttttaatcgtatcgtcggtaccacgcttttttctaaataatgccatttgcttctcctctcctatactcgacggcttctacgcttagggccattagaattcttattctttcttctaatgacaaatgatgatgacacatggaagtgtgacacttgacccaagtcaactaaacctaaggtgtcagtcaagaatgcatcatccttaactgtagtgtcagacatttcacgaattaagactactgcgaaacttaaaaccaagccaatagcaaagccagccaaggtaaagagcttcacattaggtgatgattgactaccattagttgctggcgcaacgatcgtaacgttgttaatgttcatgatgttaggaatttgatctctgaatgaacgcgctacagcgttagcttcaacctttgccttttcaggtgtatctgcagtagcagaaattgagaagacctgtgattgttgttgggtattaactgaaacgctcttagctaattcgctagtagaaacgctgtagctcttaccgctacgttcaactacttctggttgagcctttcttactaatactcggcgaccttcttcattagttctgtacttagcaggtctagcttttctaactacacgtacagggttagccaaacgatctgatgcgtccttcaagataacgtgactagttacaatatccttataggtagtaaccatttgcatgttagcttgttgagtattatatgccgcattcgggtcattcttgttagccttttggttaaccaagatctgtgcattagaagtatactttggtgaaataataaaattagcgacgccccagccgactaaagccaaaccaacactccagataatcaatgcccagatgtggcgacggcaaatttgtagcaattgagtaagatcaattgtattttcagtttgcttttgctcttgttccatttaccttttcctttaaattaacgattcattacatagctagacttgttagcagctaccttaacatgtggcaattctagcgccgttctgatcttgtcagaaactcgttgacgctcatctttacttaccacttcaatttccattgtgccaaacttaggattctgtgtttccttacttacaccctgagcatggtcttgggaaagattgtcagtggcttttctataatccatagcaatcttgtacatttgattcatagtcaagtcagtctgcatctcgctagaaatggaattcaagaaacttgaattaagcaaagttgaaggtgaaacagacttcttaagcaaggccataattaccaagcggtcacgctcttgtctaccataatcctgacgagggtcaccatgacgaagctgggcaaatgctaaagcctttttaccattcatgtgataagtctggcctttgacaaagctataacccatattgttgaaagttaatggagaagttacatcaattcccccaacttggtcaattgccttcttcaaaccacccatattgatcatgatgtagccgtcaattggaacactgtaatatttatcaagtgtcttaattgtttcgctaaccccgcccaatgtataagctgagttaatcttagttacaccatattgtgggtaatctgggaagattgcgtttgagtcacgtggaattgatacaatgcttgtactattggtcttagggttgatcgacatcatcatgatggtatcagttctacccttccagtgacgacccatggcaccagtatctgtacctaataataggatattaattggttttttctcattcagcaaattatcaagagtacgtcctttattactcttggtagtcttagcaacgggagtgtacatattctgcgtcgtatcacgcaaattcttgtagatcatcccgcaaacaaaaagaccgactacaatgatcacgccaataataatccaaaaaccgcgccagaacttacggtgacgacggtggtgatgatggcgatgacgatgtatcggtttattacttgattctgcgttattttccattctaatcctcttaatcttaaatcgttattattatatactcaagaacccattttgaccacccttaaaaggtttacatgcggcaaatacttaaaaggaggctcgttttattgctgttttgggttgctgaaataatatattttggtagatgtctaacatgtaataaaaaatgcatccctcgaaaaatggaatgcattgctgctagattgagtttaaacggaattatttttcatcttactatcgccttgccttaaattgtactcacactgtaccatatttagtaagacctaaataaccaaaaaatattaagaagtacattaaatagaagttgaatagcatgttaagtattgaagaatcaatcaaagaatttgaaacatattttcagggtaaaccaaatgaagttgaagtagtatcacgaactataaaacaaaaaagtagacggccacataaaccgcctactttatcctaattgttatgatgatcacttgagttagttaaatcatcatttttaattagatcatctatatttccaactactccaccaaatagtgtaaacacacctattccaccaaaaatactaccagccaccgaatgcctttgcatcaccaaaaaagcagaaatacaaatacatagaattgttactattgatactactatcagagatgtccatgcgagccaacctcttcttttttgacgagcaacttctaatctccgtctatgcctactttcttcaacaccattattaaattattttcttagcagcattcggatacaatttttggtatccctcaagaatatcaggaagcggaattggtccactatacatctcaagataagccattatttcttttttggtttctttaggcatctcagatttttgaatttgatcaagaatctgttcatctagcgaatctttatctgactttttctttatatcattttctagctttttacttggcttttgatctgccataagatattattccctttcttaagtcgtcccctatcctttgccaatcactggcaattgctttttcctcagcattactattactagaatatatcaacttgtttaataatttgacataaggcatagctacatttttcgataattttttaaacactaattgaatatcggtaaacataattctcacctcattcataatctctttctttattaaaagtatacttaaaatttgactcgtggtaaagattattcttctacatgcaatccacttctttccttattataagcatctgtaatacaataaacttaacagcaaataacgaggtgtttttatgattgataatcaacctaaaaagacaaaagcttatatcgcgggcgtaaacttaaacgaccaaaacttcgactactacatgaccgagctggccaacttgactgaagccaacaacatggaagtagttgggcaaagctttcaaaatgcagaatcaattgtcgccggaacttacttcggtgtcggcaaaatcaatgaaattagaactatggctcaaggcttaaaagcaaaagttttagtccttaatgacgaattgactcccgtacaaattcgcaacttagaaaaattaaccaaaatgcgagttattgaccgcacggaattaattctggaaatttttgccagccgcgctcgaactaaacaagctaaattacaagtgcaactggcacgtttacaatatgaattgccgcgtctacatccctccgagaacaacttggaccagcagcgtggtggtggcttagctaaccgtggtgccggtgaaagtaaactagaattgaaccggcggacaattggcaagcaaatttcggctatcaagaaggaattgaaggctgttgccggccaggaagaaatcaaagcggcacgacgcaaccaaagtcgcatccctaaagtcgctctcgttggctacaccaatgccggtaaatcaaccacaatgaacggactattgcgtgaattttctaaagaaggagccgacaaggaagtcttcgttaaaaacatgctttttgctacgctagatacttccgtgcggcggatcgacttgaaagacaactttagcttcattctgtctgacactgtcggtttcatttctaaactgccccacaacttggttgaatccttcaaggctaccctgcaagaaacacgtgatgctgatttattaatcaacgttgttgacgcctctgacccgaacatggtccaaatgattcggacaacacagaacgttttggatgaaattggcgttaaggaaattccgatgattaccgcctacaacaaggctgataagactgatcgcaattacccacagatcgaaggcgacgacattctttattccgccatcgatccaaaatcgatcaaactactggccaacttgatcaccaagcgcgtttttgccaactataaaaagtttgacttgatcctgccactaagcgcaggcaaggaactggcttacctgcatgatcgcgcccaagttttacgtgaagactaccaagacgatggcgtccacatcgaagcgaacatcgcgcccgacgaccaaggacgctttcgtcaatatttggcctaactcgattaggaaaaaatatgaaaaaacataatctgctgttcctttttgccctcacatttttgttagttcctactaacacgcctgtaatggctgctaaatatagtgctagtgagtcaaaaaaggtgcgcacttttcaaaaaagctatcatcgtttgagccagaagaattacaatcagactacgctctttaccgtgcagccaaattttggtattcctttttcagcaggagtgcttgaccctgattacatcaaaacttcaatggcttatgtcaattattaccgctcattggttggactgcctgatgacgctaactatgctaatgataacgttaacgcacaacttggtgctgcagcgctagcttcagttaacgcggagcaaaatctgcgagctcacggcttacaaggttacgtcaagcctggctatatcagtgatactgactgggacacagcggaaaataccacattgggcaatatcaatttttcagaatcaactagcggaaccacggctggcgagatcgttaccgatctgatacgtgaagataataatattgcaggtaatggcaacatcggtcaccgcggcatgatcctctcgacgcgagccacccgaatgggaattggtgctgcttatggcactgaaaataatgtcttgtattctgttgaacatggactatttgctgatgatattttgcgtcagcctgtgaaaagccgaatcgtttatccagctgccggcgtttttccttacgaattagttggtggtaaaacgccatggtcttactcaacaaccgagcgaatttctggtcagccgaaaatttacatcacggatttgaccaccaagaaaaagcggcaagcgacgcaggtgcgcaacttcggcactgctctttatggtgacggctacacaacgacaatcacttaccgacctggcaaaaccaagttgatcagcacgcacaagtaccgtgtgcaaatcggcaaacattatagctacagtttcaaatttttcaggcaaaatagcacattgaaaaataaacagattgtaaagcatcgaaaatgaaatacgttgatatgcaaaacggctcaagcagttgtacatcctgcttgagccgttttagatagtaacaaatattgtagtctgttcaacaatcttcatgtaaaataatactcaggtctattgcagcggttagctaccgctaagacttagtaattttagcatggctacacacccctcaagattttttaagttacggaggtggaagcatgcataattgggtagactggagaagtaggcttacaaatgattgcttgggctattgcgtatgcgataacaaaaaaagctaatcacaatgattagccgaaacaacagtcatcttaagttacgattggagttagcgaccgacactcgctagctccttttcttttattattttaatatgatttagaatttattgcaatgtttagaagcgcttattctacgccaatgacgtaacgcatgatgaatcaatagcttgttataccaagcataattgtgcttcatataattataggcggttgtaaaattttccagttggctagccgcaatgaattgattgcgtgtccaatgccaatcctgagtaggataatataaaattttcactcggattacccttcctactgtaataattgcccgatcatgatgataacgcgtgcgagcaacattgaggtagctaccaattaaagtattgcgccagtatcgattatgcagataatttttctcccaaagcaaggccctgcgcaataccttaaaaatgcagtaccattcgcgtttgccgttaggcaattcaaccaaacaccaaagatattggtgtctcttcgccattcaatccaccccttctaattaatatcggctttaattataccgctactagctattcagttagaaaatcaataatgtcagaaaatattaggtcatgatgtcaaatctattcaactgacatcatttgtcctaagaacgcatttaccgcttgcttaatatactcgctgcaaaggtgagtatactgcgttgaatttctggacatggctctgcttaaacggtcttgatgggtgtcattttaatcccttctttaatttttcagtctagagaaaacttttatcaatacaaaaaagcaagcgcattaatcgcctgcctaaaagtattccaaattacttctctatagcactctcttagcaatcgatggtgtaaagtaactcgataccgtttgcaaaatagtaccttgctccggtgttgctgcgtttacatattgattgtttcctacataaattgcaacgtggtatggagctgtcgttgaaccccagaagactaagtcacctggctgcaagttgttcaatgaaacagtttgaccaaccttaacttgatcataagttgttcttggcaagttaacaccagccgctttttggtaaacatattgtactaagccagaacagtcaaatgaatccggaccttctgcaccccagacataattcttacctatctgttgtttagctagcgcaacaattgaagcggccttactagtagcttgcgttgaagaagtttggttagtattttggctagtcttcttgattgccgtattaacaatttgcttagccttcttcaccttagctatcttttcagccttcttctgagtagccgttttagtagctactgccgctgtcttcttattaacagtagtctttgtctgcttagcttccgttttcttaacagttggtgcttgcgatacttctgctttttctccagcagtaacatctacggtataacgcgcttcaatccattcacgcgttccaaccttgtaccacaagttgcccttcttatcgagtgcagtctcagctacattccagaccgtgccgtccttagcacggtagcccatgaattgaccattctcatagttggtccaaatattcaggctcttacctggtaaatagctaatcttaacttgcttaatcgcagtaaaattagctgcacgaacagttttcattgatgtgattgcggaaacacccgtaacggtcagggctgcagccgctcccactttaaaaaaattatgtttcataattgaatccccttggtagcgaaacaggtgaaaacttttcacctaaaattacccactcttactatgtaacgccttcattattgcatgtcctacctcaagaagcaaattagaacattacaatattacaaaaaagacggatcactggaatccgtcttcattacttactatcttaatttaaaacacgcttagcaacacttgggtagaagtatgaactcaaagtttgcttgattacgccttgacctggtgtagcagcgtggatgtattggttgttaccaacatagatacctacgtgatatggagcacttgcactaccccagaaaagcaaatcacccggttgaagattatccatagaaacggttgatccttgcttaacttgatcataagtagttctacccaacttcacgccagcagcgttagagtaaacatattgtaccaaacctgaacagtcaaaaccgttagttcctgtaccaccccaaacataggacttgcctaattgtgctgaagccaaagtaataactgctgaagcatcaccagttgcttgaactgacttcttagcctttttagctttcttaactgcttgagccttatctgaactagcatcaacagtatattgagctaaaatccattggttatcaccaatttggtaccatgtacggcccttcttatcagtcttggtgtcaaaaacattccaagtagtaccatgttgagcacgttgaccagtaaagtggccaccattgtagttgtcccatatgttaattccataacctgcaatgtagttaatctttactttggtagtagcagcttgaacagtagcattagttgaatctggcttgatgacatttactgcagctacaccggtcagagttaatgcagcagctgcggtaacttttacgaaattgctcttaatattcatcaaattctcctatatgttttcactatatatataagcattcttagaatttattacttaagctggtaacgaaaatattaattcatcgaaaaatctttaaatttctttaacgtatttaacaaaatctataataatgtcctaatgttacagtagtgttacaaaagtaatactgatttaataaatattacgtttccgtcaaaaagaaaaatagctagggagatttccctaactatcttaattagatattttatttttaggaagactaacgcaattagtcgattacacgcttagctgatgatgggtaaaatgaagctaaggtttgttgcttaacattttgaccaggagctggagcgtgaacaaacttgccgttacctacgtagatacctacatggtagttaccccagaataataagtcacccttcttaagcttcttagttgaaactgaaatggtcttaccaagagtaatttgaccgtaagtagttcttggcaaaattttgttaattgcattcttgtaaacgtagctagttaaacctgagcagtcaaaaccgctaggacctgcagcaccgtaaatgtaaggcttgccgatttgcttcttaacaagcttaacaaccgcattacgctccttagtagtagctgattccttcttaactgaacttgaatcaggattggtagtttcaagatctgaaattgagttgttagtattgatagtagtgcttgaaacatcatcagcgtgaacagctggaacattgatcattgaaataccggcaaagaatactgataaagctgcggtgtattttactaaagtacgtctaaaattcaaaattaattgtctcctctaaaaattactaaatttgtttttgatttcttaaatcagttgacggtttatataataccgactgaatgttacacgaatgtttcaaaagagctaccatcgcgttaagaaacatgttaaaaaaacagattttatgtaaaaaaaggagaagcaaaatgctagcgaagctttgctacaagggcatcgagcgcgtttttagtttctgttaaattgtcgttaactaagatatgagcgtattgcttcaaatcttcaggtaaagcatttaattcactgccgctaagtctttctttaatcttggatggatcatcgccccgctttaaaaggcgctgttttaactcttctttagtagaagttgtaacataaagaaaataagccttgtcacctagctgtttaatgtaggaataaatgcccttgatatcgacaattaatgaaaccagatcactttttttccaggccagattcaaagcttctcgacttgagccatattgataagagccgtacttaatatgctcaaaaaagtgcagctgggcaaaagtttcatcggtttcaaaatgataagaaacattctgctcctcgcctgatcgcatcggccgcgtggtatgcgttaatacgcgtggaataccatatttttcagttaaatattctgaaacagtcgtcttgccagcaccactaggtcctgcaataagaattatttttttcaaaacctgattctccccacttgaaaatgttgcttttttataatagcattcttgtgttataaaagactaagactttttctcggaaggaagatacacataatgaaaaaagcagacgtaaaagttggtgcaatcgttggtgccaagtcagaagaagaacttaagaagccattccaaggcaaagttgaaaagatctacgaaaattccgcattgcttgcaattacttcatacgatcccgttgacaccactgctatcagcgacttgaacaataagatcgtagttaacttcaagaatttaaagactgctcgcgctgccaagaacagcaagactgcttcaactaatgaagttaagattgaaaaaattgccaagaagaacgacgataaaaaagaagcagacaagaagtaaaatttgacaaaaatagcccgcgcaatgtttacgcgagctatttttttgcctaaaattaggacatcgatacgagaggaaatattttatgaaagaaaaaacgcgaactgttttattttggtttattttaatccagccctttttagacctttattggttctacaacggtaaattagcggaagttttaccatttactctacctacgattatccgaattttagctgtttttgtgattttctgtatgtttttcagtcaaaagcaaaattggcaaaaattagggcaagacaagtggttaattctatatttagccctactaattttgtattcgattattcacttaatccacgtcaaaaactttaacagcattaatcctaatgactacaattattcaaccgtaagcgaaatgttttatctcattagaatgcttttacctctgatggtgatcttttttacaaaagaattgaatttcagtcaggagcaattcagacacgttatcgaaggcatcagcggacttttttcatttacaattgtcattaccaatctttttgtcatttcgcttagaagctacgagacaggcccgattagcgctaatatttttgaatggtttgttaaccccaatatcggttactcccatatggcctccaaaggcttcttcaattttgccaacatggtatcagccgtactctttatgctggtgcctctgatgctttacttcatgttcagtcgttttaactggaaaatcgtcactttgaacgtagttcaagctttagcgatgatcgagttaggaaccaaagtggccctcatcggtttaatcggtggcgtgattatcagtattttgctgtatgttttccacttatttattgttaaggatgttaacaaaaacggcaaagccattatcgtggcgcttttaatcgaagcgggcacctttgccatcatcccctttggtccagcaatccagcgctataattatgaaaaatatttggctcagcaatccgatgattctttgacacaggccaagcgagaattaaatgctggcttaaaaaaatatcctcaaggtaaacagcgcaaggaatttttaacgaatttcatcggcaatcattatcaagattacgccttaaataagaagtttgtttttaaaagctacccttataaatacgatcctgaattttggctcaaaatcatgaacgagccaggcaccgctagaatgcaaaatcgacatgtagaaaaagcgatgcttgatcaagttgtgaagactaacaataatcgactcgacaagttcctgggcatttcttacacacgagaaaccaacattttcaaccttgaacgtgatttcactagtcaaatttattcacttggttggatcggcatgctgttgttcattgggccttatgtcattatcctgctctacgctttaattaagtggctaatgaacaaagaaaagcggacttatttgatcagctcaatgttgctttcaatcgcctttatgattttcgcagcattctcgtcaggtaacgtaatggacttcttaacagctagcttcatcctggctttcgttgaaggcagcttgttagctagcgtaaccagaaaagaaaattaaacataaaaaaagttaggtagttgcttgcctaactttttcttagtttttaaacattatttttcttgcttaataaagcttgaatctggcacccgaattaagtagtaccgagttgctaaatgacctgcatgcatcccgattccattttgccaattccgcttgtacttagccgtataaattgccacgtaagcacgttgatactttttatccattttagccaattccttttttacataaggaatcttctccgcattcacgtcaagcgcagtgttaccataagcaatcgaagcatagtcactaccaatcgtgaccttgctgccatcgcgataaaaagtataagtttgtgagccatatctcttcttagcagaattaatcgttacatagcttgaatttcccgcacctgtacgcattatcagtggctcatacttcacgcttgaagtaatgcggtttgcatcttccaggtctggattgtccataaaagtctgattaaacatccaacctgcagctaataaaagtactacaatttccacaatattaagagccatattcggccaactaaagcgtttatgctgtttgataatcatcttaatccgtctttgacggatgttctggacgatgaaaactaaataaagaatgatggcaacccaaatcaggatcccaatgatattccagctgaacatatctcgccctgctatataaaacatagaaacatgcagaagttttcatatttctacatgtcagaaagaaatatattttcctttctttgtcttatttactgctgtcttcatcagtattccgatattccatctggggagtaatcgcattgactaactcttgcagcttaagggcttagccagcccattgtttttattttgttaacgctagtaaatttaatactgcattgtcatcacgatcattgctatagccacattcataacaaatgtattcattatgcttggtgccatgttttttattgccctgcagagtaattttgtctgcaccagttttgacatagccacaattggcacatctttgtgttgatggatatgttttatcagctagaattaattctttgccataccattcacacttgtaagtcaagacttgtctaaacttgccaaatagtgacctttgcatgcctttggaggctacatgggtcatcatcatttgtttgacattcaagtcttcaatgacgatttggtcataattgtttacatgctcagtggtaaatttttgcaaaagatcattctgaatattggctgctttgcgataatcacgctgaagcttggttctcacttgcaggtaattattgctttggcttgccgatttaccgttaactcttctctttttagacaatactctttgataatgcttgattcgcttgtacagtttctgtagttttgctggcaaaacattaatcttgccttcagtgtagttgaaatgcccaacgttgacatcgatggcggtctttttgccagttttagcctttagtccagcctcttcttcataggaaagggcagcgtaataatgtcctctttctctaaagatgctggcaattttaacctcttccatctttaatgcctcgtatgctggaatatcaaaccaagatttaatccctctaggcttatctaatctaagcttgccattaattatcttggcgcgatcagttttaaagccttgacgtggagctttcttagatttgaaatgcggcttgccccaatcaggctgggtcttgtcaaagaagttcttccaagcattagccagatccttgactgctaattgcagacagcgagcagacaaagcaaattgccaatcagccttgttattgactaattcatcccacactcgatgctcattaggactaggattattatccttgtctaaagtccaagcttcatacatgtcttgccaggttgctaaagctagattccagcagtatctgcgatagttacaaagacgttcaagttctctttgcattatcttatttggccttaattcgactacctgagttttgatcatttgtttcacctccaatgcaaacataagtttagcaaaggatgtaacaaaaacaagcgaacaaaatattaaatttttagcagcagttaatttgcttctatgttttgcctttctgaacaaattacctgtatctttttctatattgccattaaattctatatttcagctaaccatttaatcctcctttttttcaattatatggtaaaaaaagcaaaatttgaataggataataattgaatacttagttaaatagtgagaagatcttactagtacattagatttattagggaacattatggtagcaatagctttttattcaattactgggcaaacggaacgttttattaagaaaactcaactttcggcccatcaaatcgacgatgccaaccctaagtatgatatgggaaaatcttatatcttaatcgtaccctcatatcaggacttcatgatggattcagtcgttgattttttaacgtataaagataacaaaaaaaatattatagggattatcggttgtggcaaccgaaactttaacgacctctttgctcaaactgccaaaaagatcacggcaacattgaaagtgcctattttgtatcttttggaatttagtggtactaaccaagatgtcaaaaatgtacgaaaaatcgtacacgatctttctgctggtgagagtactaagcaagtccaaaagcctaaggaattacgtgggaatatcagctttttgagtgattttagagattaaatatgactgaaaaatattacaaagcaattaactggaatgacatggaggaccgggttgacaaatctgcttggtcccgcctgaatgatattatctgggaaccccgtaatgttccagttagagaagataaaaaagaatttttacaattagacaagccggtgcaagatgccttgcttcacgcattcggagcactatctttttcatctggactccaaatgaaaaatgggctagagcaaattaaggtagatgccatcacaccagaggaagcagctgtgctgaatgccttgcaatatttggaatctattgccaataaaggctacagctacgttatcaacgagttgacggactcaaatatagcaaaagacgttattaactgggctgatgacaatccttacctgcaaaagaagattcggattttgaataaaatctaccaaggcggggatgcactacaaaagaaggtagctaacgttatcctagagacagctctctatcattctgccttctacgctccgctttatttattcggacaaggcaaaatggtacgaacagctgaaattgttaagttagctttacgtggcacttcatttagtgggatttatcctggttacaagttccgcttaggctaccaaaaattaggtaaaactgagcaagcagagctaaaagaatggatcgataacttgtacgatgtgctaattgataatgagaagaagcacattgagttaatgtacaagggcactgactggatcgatgatgttacgcactatctctactacagtgtcaacaaggcctacctcaacctaggtttttcagccaagtatcctgacacttctgattcaatcaaccctattattgaaaaaggggtcatcaagaatgcagtgcttgaagacttcttcttctacactaacgatcactcgctgactaagtttaaagaaattaaataattacaaaagacgcaatcgaaaattcggttgcgtctttttttacttcttagtagttttcttggttgcctttttagtagcggttttcttttctgcttcctttttttcaggcttcttatattcacgtattgtggttagcttttcaataattgcctccaccagttgatcaacaatcttcgctggatcttgttcgatctctacttcactggctaattgatcaattctaaagcctgaaacattaacgtattcagagcgcgtttcaaagtaaacatttaaaggatattccttaccctcttcaaagaagttagcaactcgtttgtaattgctataaggcaaattgataatatttgtctccaaggcaaaagtagccggccgctgacccgtcactgctagttgcgtttggatcaatgaattatgcttaaaagcagcgataacttccttgaccatcttttcagcatacggcttgattttgctcttcgacttgctaatgtcggcatatttaactgtttcaagatcttgaatataatcttgattttcaattttttcgttgagatcttttaaattaatttccaaaataaactttcctttttcattggttataattacaaaatactacaaaaaaattttttgtcatcctttttaaggattcaattcagtatttttagctttttatttgttaaaatgacactatgaaaaagcaaaaatttgatcttaagtatttatttttactcattcccattacgttaattctcattataggattgatttacctttttaacaaaaataaaatcgataatgaaattaattggatgacaatgaaggaagaacagcggctcaatgtcccgctagaaaatcaactgcccgatctacccaacggctgcgaggttactagcctatcaatgttactgaattactatgacattaaggttaacaaatatgatctcgccgataatattgctcatgttgattctttcaccgacaacggtaaatatcgcggcaaccccaatcaaggctttgtcggccatatgtctgtcgctaatgctggctggtgcgtttatcatgggcctttatttgacgttgcacgtaaatataccagccacatagaagatgcctctggcagcaattttttagcgattctcaagttaatctccgatgggcatcccgtgctgatcattaccacaaccacttttaatcatgttaacaatatgcaaacatgggaaaccaatactggtaaagtcaacgttacaccgtcatcacatgcctgcgtgatcacgggatacaacaagcaaaagaagcttgtctatgttaataatccttacggtattaaaaaccaaccggttaattggcataacttagaattgagttatgaccaacaaggacgccaggcactttacatcaaataacaaaaaagggcaagccacgaaggcttgtccttttaactcaaggcacatgctcaaagcatatgtggacgtttaaactgttcacatcagtgcgtccaacatcagcacttcccgtgcttgccacttaaggcggatgtcctctatctcataaatatacgcatctcgcgttcattaatcgactcgtcagtcagtaattgtactattttttatgtttgatgtacagtctagcacttttaaaatgacgatatttaaatttataaaaaacttcagtacacatagtcgataacatgaaacctaaagcaatagcaccagtaacaattgctactcgtagaagcaaattctctccttgactataatcccccacaactaaagcacgtactgcttgataagcaggcacgcccgggactaacggtactaaggcaggaatattaaagaccgtcactggactttttttaatgcgtgcaaaacacaagcccaaaatacctatcaaaaaggcgccaattaaatttgaaatcattcgcccaaatcccaaattaaagcaagtccaatatgccatccagcccactgtgccactgactcctgacaggtgaagatcgcgatgcggtacattaatagttaatgcaaaacccaccgaagctacataagaaaaaatgacattaataataatttctaaccaaagtggcatttttatactcctatgaatttaagtacaagtgcaactccaccgcctaaagctaaagcggttaacacagcctcgcacattcgcataatccctgataataaatctcccatgaatagatctcgcaaagcattagtaattgccaagcctgggactaaagtcatcagagcgccgatcaaaatattatcagtaatcatttgtggattaaaatgattgaataatactgccaagatccccatgaccattgctgcaattagctctgataaaaaacgaatcttagtatattttttaaactcataatacgaccaaaaaccaacagcccctactaaggcagcacctgggaaatcaacccagtcgtaattatccataaacaaaaccatcaaggtagcagacaatacagcagctcccaatacctggagccacattgggaaagtaggtgcttgtgatactaaagcaatcttttcttttaattcagaaagagtgatttttttaactgcaaattggcgcgacaagtcattaacccggtctactaattccaaattgatgttgcgatcacgaatttgtttcatctgacttagcttgccaccatctaagctcatgaaaacacaggttggcgtcgcaaaaacacgcggatcatcaattccggcattgcgagcaattctgagcattgtatcttctacccgatacatttcgctcccgccttcgatcattagtcggcccgcagttaaacaaatatccattacttcttgataaaattggacatcccgcttctcagacatagttttagcctcagttcatagtttcaatatcgatggtcttgtcgacccaatcaccgcggaaaaagtcacgttcgtgactaacaataatgactccgcctgggaagttaacaatcgcttttctcaaagcatccttggtatcgttatccaagtgattagtaggttcatcaaggaaaagcaaattagctggttcaaactgcatcttagctaattttactttttcctgttccccaccagaaagttcctttagtggactcattgcttgttgtgcagttaagcccatgcgtgccagcgcttgtcgcaattcctttggctttttgcgttcaaattcttcttgtaaatattggagtggagtcatgttgctattaggccaggttagatcttgcttgaagtaagccaactttgcagtaacagataactcatatgaaccataaattggctttaattgccctaacaatgtcttaagcaaggtagtcttaccaattccgttaaaaccagtaatcgccactttttcatccccaccaacagagaaattgaaggctgacttgaccaaagcatggtcgtaaccgatgaccaaatcttgcgtctgtagcaacaaattagaagcagtcgcaacatatggaaattcaaagcgtgccttgcggttgttttttggcggtgtcaaaacatccatccgcgccagctgcttttcccgtgacttagcactcttagcacgtgtacccgccttgttcttgcgaatataggcctcagtcttagcaatcttgcgttgctggttagcataagccttcaagtaggtctcacggttggctgctttttgccgcaaggcttgcttcaacgttcctgtataacgagtaattgtgccaaaatcgatatcgataatgcagttagtgattcggcccaaaaagtcataatcatgactaacgacaataaaggctccagcaaaattgttcaaatagtcaaccagccaatcaatatgtgaaacatcaagatagttagtcggttcgtctaaaaccagaacatctgggctttgcaacaacaactttgctaaaattattttagagcgctgaccaccagataacttagaaacatcgtgatcatagcctaaatcagctagtcctagtcctgaggcgacttgttcaatttcagtatcaatatcataaaaattattttcttctaaataagtctgtaccttgccggctttttctaacagggcttcgtccccgttttcggcatatttggcatacagatcattcaactctttttctttttgaaataattgatcaaaagccgtccgcaaaaagccacggatagtcacaccaggtgccaatttagcatactggtccaaataaccaacatcaattttattttgccaagttacttgaccatcatcgggcaaaatttcacccgttaaaatcttgattaacgttgacttgccaacaccattttgaccagtaacccccatatggtcttctttgttaagcacaaaattggcatcttcatataaagttttatcaataaaactctgacttaaatctttaacagttaataaactcatttttcatcccctattatttagctgattcatgttctttttcataattttggagtgcatcaagaacacgaggccaatagcgcttaggtaagatcagttgcaaacgatcatgataaataggaaaatcacttgcttttagccccgtaatcttagctagctcctgatctgtcagcttatatttataaacaatacgcttaatttcgactgatgcatgtcctctaaaataggataggccgaagaaaaagatagcaaaaacacttgctgtgatgattgctaattgcaaattcatcctgaagctgtgtagacaaataaaaatcacggcaataaaagaaatcacagctgagagtacaccgtaaataactggaaatattgattctttttcttccttttgcataatcttttcctccctaattgagacttagtaactttacgaacttagcagaaatcagccaaatttgcaagattctacgttttcactgatttttttacataagttaagtatacttagcataattaaaattgcacggagaaaaaaggaaaatgaaacaagaaaaacattattatttcacaccaattcatttgcaaattaatgacttagacgtgcaactagttttgccacaagtcgagcaagcagcagaattatatcaagctgttgcctgtgaccgtgaaaatttaggtaagtggctgccgtgggcctacaaaatgaaaagtgcacacgatgaagctaattttattaaacaaattcaagccaaaatgaaacggcagtcaatactcgttttaacaattttagtcaataagcagccaagtggcatgatcgacctgcataatttgattccaaataaaaaagccgagatcggctattggctgtcgagtaaatatcaagggcatggtattgtcacgaagagcgtaacggcgttatgccagcatgcttttagtgagtttaacctacactatattgatctgctagttgctgtcggcaatgacaaaagtgcaaatgtggctaagcgttgtggttttaaattgatgggaattgaaccacagctaattaatgggcctgacggacaaatttttcgtttgattcgagggtaaatatattgtgttcgcttgttatcaaagctaatattggataaaatatttaaacaagtgtttgagcataacactttactataaaaatgaactcaaatataataaaagtgtaaggtgatatgcatcaatgagtagtcggctcatggtcaatctgattctaatgcaggacataagggcctgacgggtagcagggaccaaaattaaacctgatattacatatctaagacgcaatggcttagttggtggcagacaccaaaattaaaccgactttaggagttcacaatttgtggactccttttttacttggaggaaaagagatgaactataaattatttaaatcagttaatttaaaagaattggggcaattacgtcggtacatatccattatttataatagtgctgatttttatgataaacattttgtaaataaaaccatcatttacactactaaaaataataaaattgaactcactgcaagaagagataactttatgcatttatgtggaatttcatatatcgaagggccaagaaaattttttaatgatgctctagatcgaaaagtacagctaaaaaagttcttattaaaaaagatggctctacttttcagaaattacaagttttaaatcaacttaaagaaatgttaggtccacacttaagattaacaggacgtggagcctttacatacctaaaattcgatcattctttacgtacaaataaaacgatcttggctcttgcattattaaataatcaaaattatatggttccaatctctttgctaaatttgaaattcatccatccatttcctaaaggagataagattattaaaatagaatctaaagatctaaatactggtaagattattactcttagatgattcgcagctaaaaccacccagtcaaatctttaataatgaaaaagataaccggcaccaataatgatggcaagaaattcagagtcttaacatcacgaatttttaataaagacaaaccggagcaagcaatcaaaaagccaccaacaatagacaattcagtaactaatggacctgtaaaaaaatcagccgacaaaaattttgctaccaagtaaatgctaccttgccagcaaaataaaaccggaacgaccgctagcatcccccaaccaaagctagcgccaaagaccatcgaagttactaaatccagcatggcattggtaaatagcatagtattgtttcccttaactgccgccatcacgggacccacgattgacaaagcaccaatacagcaaagcaaaatctcagtagctagacctttagctaaattagatttgcctgctttatcaactaagtgattaaaacgaccagcgatattgagcgcggtaccgactactccacctaaagccaagctaacaatgaacaaaactggatagtgacttttaggcatgctgttagtcacattctcccaaccgatgcctaacgctgccagtcccattgcgatgaacaaaacgtcttcataacgcttattcaatcctttctttaccaagcagccaactgtagtaccaaccagcaaagcgcaagtatttacaattgttccgatcatttttctcacctcttagttttattttaccgcagaaaaaaagtatccatctcggatactttttcatatttaccatttaaaatgccaactactactcgatgacgctgaagaactagatgaagatgtgctttcacccgtacctgaaccataaccagaattcgaaccacctgccggcttatcttgattttgatcataaatccgataattggtgaaagcattgggatcatcccacttgatgtgattgttctgatcattcaattcattttgccgcgtttcttcattgttcaaagtttgtgtttgcaaattcaggttcttacgaattttatctgacgtcttttgtagttccttagtagacgccacctgaattgaagaaccatcaatccaagcatcatgcccttgaatgtagccactctttaagctattcatgcagccacgataattgagcgccaaactaagcatatcattgaatgtcagattagttttcacatatttattgaaaatatctaccagcttgcggtaattgccaagcgtattaaccgacattgccttatgtgcaattgcctcaatcacctgacgttgccgcatctgacgaccatagtcaccacgtgggtcttcttttctcattcgaacataagccaccgcgtgccgtccatttaaatgctgcttgcctttgtggaaatcacaccagtcatacgagaagtcaaatggaacttggacatcgacaccaccaactgcgttaaccaggctttttagcgccttcatattaacttctagataataatcaattggcacatttaacattgatgacacagtcttcatacttgattcatgtccaccgatttcataagcagaatttacccgaaacatgaagtatttattttctggatcgcccttaatatctgccaaagtatcacgtggaattgaagtcattgtcgcagaattcttttgtggattagctgttgctaaaatcatagtatcggaattaccacgatcatggcgaccttcaatcccctggtcaacccctagaactaggatagaaattggctgtttattggcaattttagctgaagtagcagtgttgccgccgtttttaccatcaatcacactatggacggtaaaatacatgtgagcagcccatgccatgccaaaacaagcagttaataatactgccacaccaatcaagcgggcaaaaaagttacctgatttgagcgctgatgcatctgcggctaaagcacgattccgatgaagattaagcgatgaacgatgagcgcgataaccttctcttcgttttggattttggtccattcttttgatcgtttcccttcgaatttaatacaagttagtttatttgtatcacttttaatctctcgataaaataaaaatgctaataattaataataacttatttttttgcgaaatataacgcaacaagctaagatgtatagaaaatgaaatattatggaggtaaaaatggcaattccaactagaaacgaagtccctgaagagcttaaatgggacttaacccgtatttttaaaaatgacgatgaatgggagcaagcttatgcagctgcacaagaaaaagtggctaaacttgctgaattaaaaggtacactagctaaatcaggcaagaacctgtacgagagcttaaccaaaatcttagctgttaaacgtgatgtggaaaatatctacgtttacgctaccatgtccagcgatgttgatacttctaattcgcactatctcggctacgtcagccgggtacaaagtttggctaaccagtttgaggctgcaacaagttttattaatcctgaaatcttgagtatccctagtgataagcttgagcaatttaagcaagctgaacctagattaaaggattacgcacactatcttgaaacaattactaacaagcgtcctcatacattacctgctgagcaagaaaaattgatcgccgatgctggggatgctttaagtgtttctgaaaatacctttaacgttttgaccaactccgacatggaatacggttacgttcaagacgatgacggcaatatggaacaattatcagatggcctttattctttgctgatccaatcccaaaatcgtgatgtcagaaaaggtgcttttgatacactttatgccacttatggacagttccaaaattccttggcttcaactttgtctggcgttgtaaaaaagcacaactataacgcacgtgtgcacaagtataattcagctcgtgaagctgctttagccgataatggcgtacccgtagcagtttatgacactttaatccaggaagttgattcacacctagacttacttcaccgttatgttgcgctacgtaaaaagatcttaggcctgaaggatctgcaaatgtgggacatgtatgtgccactaaccggaagaccttctctttcatacaatttcgaagaagcaaaagagacagcaaaaaaggctttggctccacttggtgaagactacttgaagcatgttgactatatttttaataatcgtgtcatcgacccaatagaatctaaaaacaaggtaactggtgcctactccggtggtgcttatgataccgatccttatgagttgctcaactgggaagataacatcgattcactttatactttagtccacgaaactggtcactccgttcactcctggtacactcgcaatactcaaccttacgtttacggcgactatccaatctttgtggctgaaattgcttcaactactaatgaaaatattttgaccgaatatttcttagaccacattaccgatcctaagacgcgggcctttatcttaaattactaccttgattcatttaaaggcactttattccgtcaaactcaatttgccgtgtttgaacaattcttgcacgaagccgatgctaagggagaaccactgaccgctgacactttagacgacgtttacggtcaaattaatcagcattattacggcgatagcgttgaaccaggcggcgatattgcccttgaatggtcacgaattccacacttctactacaatttctatgtgtaccaatatgcgactggctttgcggctgcaacggcattagcaaacaaggtggttcatggaacgcctgctgagagggatgcctaccttggtttccttaaagctggttcaagtgattacccaactgagatcatgaagcgtgctggcgtagacatgactaagcctgactacttagaagatgccttcaagacttttgaaaaacggttgaacgaatttgaaagcttgattgagaaataaataatcgcgctcatataaaaataatcgatatcatttcgtgagatttgatatcgattttttgttgatgatcttgatttattacttggcatatttatcgctcaatatgtataatacgtatataagtattatagtgccagaaaaggtgaaaaatatggctgaaactttatataaaaaggtcgttaaaaatggttcttccttagctatcaatatcccagctaaggaagtaaaagagcaaaatctcaaagtaggcgatattgttgaagtaaaaatcaaaaaatcagaccgtcctaattctgaaaatttaaaagaaatagatggcttaatttctgattactgggatatgttagagtacttaaaggataagtagtcaatgaagatcaattatctaacagaaaaggatattttagtaatcaatgcaagggttattcaaagagaaggtgcaacgggacaaaaacctcacgttagggatgcagaagcccttcattttttagttgttcaacctaagcaaactagttttggacaagaattatatccgtcttttgctgaaaaagctgggattttattaattaaattagttaaaaagcatgtttttgaagatgcaaataaacggactacagcaattgcattcttactatttttacgacgcaattcttatgaactaacctgtgattggcaagatttagcaaatcaaatcttaaagatcgctcaaatagatgacaatgaactaaattaccaagaaatctatcaatgggttaatcaagtaattcatgaaaactaaaaataatcgatatcattttcgccctaatattatattttatatgaaataataaccactttataaaaaaataagggctattaacccttattcataataaatccatcaactatttcctatgtcatactactactcgattgtcctgcataaccagctagtgtagcctgcaagtcatgaataactttaggagcattaaaatttttagcaaattcgtactgttgcaattgataatataatctagaaccgatatataaagcagaatcattattttccgcttgatcaattgttctatccaaaattcttaccaaatttggattatcaattacatctttactaaaacgaactttttctagttcattttttaactttaaagtctcatccttcttaatcattatttacaccaaaggatgcgcaaatggtccatccttctgccatccagtatacataatacgaccaacgctatcccacatttgtgctaaattatcatgacaataatatcggttgcaatatacaccattaccatagtaatggtactttccgcctccgcgcttgtgatgtgtaccgcctaaaacttgacttaattgattttcttttagttcttgaaactttaccattccagacacctccgataaatctttaagcctgcctcacttagtacttctatcaacttacatatataagtctaccaaaacagtagtgttttctaagaaaacgtcagaaactggcaacgttcatatcatattctgttaaaatacataatttgatcaagaatttagtacctgtcgatttaccaatcaaatactccagttacaataccgttagcacccactgctgcatatctttctagtttcagctgaagttcaactatagctttaggtagttcattttcactaaagttttctttcaatttcaaagacaaattagaagcaatcgattgaattgactcatgcttatcagctttcgcaatagcagcttgtaataactcaaccaattcggcatttttcttaacttgaggatctgaaatcactgtattcaatctactcttaaatgcagcttcttctttaagattctttttaaagaacatatttatctccttgtattaaccttgatttttcagaaaatcatacaactcagtagctgtttttcctccacctacccatgcgttagcaatttcaccgtttttaattcgcataacagtgggagtacctggcacttccaagttatcaaaagcataatctgcattatctttactttcatcaatatttaaatagtataattgaccaccaatcagattattaaattcatttaaagtggctgaatattgtcgacaataatagcacgttgggcaaccaatatacaaatatctatcaatattatcttttttatcgaaaaaagaatctacttcatctgaattaagagactgtaaaatattttgtgtaaggatgaatgattccttaaatttatttctttaaacattagaaaaaggagttcctttctcgtatgattggtttgaacaaaaaaacacatacagaaagaagaactccttcatgaatgattttaccaaagattttgctcaagctctattcaatccagacaaaataaatgatttattgcgcaaagagctacaacaggctgttaataacttgttagaagctgaattgactgcctttctgggctatgatccctatgccagaaatggctggaatactggcaactctagaaatggtgcttatttccgcaaagttgatacgcaatttggcccaattgaagtgcaagtgcctcgggatcgcaacggtcaatttcatcagcacacgctgcctggctacaagcagcactcggatatcttggaaagcatgattatcaagctttactccaagggcgtgaccaccagggaaatagccgatctaattgaaaagatgtatggcagccattacagtccagcccaggtatcaaatatttccaagcagatgattccaaaggttgaggcttaccacaaacgcaagctaagcgacaagtttttctgcgtctatttggatgcgacataccttcctttgcgccgagaaacatttgagcgtgaagcagtctatattgccattggcatcaagcctaatgggcacaaggaggtcattgactactgcattgcacctagcgagaacattgaagtctggacagatatgcttcaaaacatgaaatcccgaggcttaaagcaagttgagctttttctttctgatggtgttgttggcatgaaaacagccttggccaggacttatcctaaagctcattttcaacgctgcttggttcatgtcatgcgcaatatctgcgctaaagtacgcgtcgacgatcgtgaaaagatcatgaacgaattcaaacaggtgcatcaacagacaaacaaagaagaagccacagctgtcctgcatgacttctataccaaatggggcaaggtttacagccatgttatcagaagcttgaaagacatagaaccagatctgctggtcttttataactatcccaagcagatcagagcttcaatttattcgactaacatgattgaatcatttaacaatgtgatcaagcgcaaagctaagcctaaggcagagtttccaactgaacagtcgcttgatgcttttattggcattcaggcaatgagctacaatgaccgttatttcaatcgaattcataaaggctttggtcaggttcaggacaccttagaatcctactttgattaaataaataattaaaaaatcaatttacgagaaagaactatttacacaaaagatttgacagtttcttaattggagacgctacaacttgccaatttatagctaaaatacctaaaattaataaaataaaaatatttgtatatttttattgctttttcatagttttatattcctacaaaaatctcagcagcaaaacaatggaatcacaattggtgccacaagttttactgttctaccaacatccttaccaaatttatagcaattatagcctcttttaccacctacacattctagtaagttttcatcttttaaactttcaaattttttcataattattcctcacctcgcatatttacatagtccttccttaaatccacgccaatacttaccttccgacttccaaaacttgttccatcctttactacctcctacaacacttaccaattcgtttgaacttaacttttcaaaaccaacagtattttccatttttatacctccgataaatttttaagtctacctcgcttagtacttctaagcgcatcatcaacttacatgtataattttaaccaaattaattcaatatccatgttatcgttatatattgttaacatatacatcacgcgtggtgctagttaaatcgttctagacaataagccaaattataagctaaaattgcaatttccaaccggctttgaaagcctatcagactacgtgctcgattgttctcggcattgtaataggtcagaagcgaaaagtcgctttcaattgttctgcgaatagccatcaattgatgatcattgtgctttttagctcctgtcatatttttacgatatggtgtccaaagttcgtaacccatttgttttagctgttgatgcagttctttgcctaaatagccttcgtcgccaagaagatagtaattagatggatgggtattttctatcagttcaactgtctccctggcatcatgaactgatgcctttgttacgacataatcaagaatgtaaccgtcatcgctaacaatggcatgaactttgaaaccatagaagtaaattttcttggtggccttataaccaatgttggcataaccgcgaaaaattttagcacgatagtttcgaattggttggcaaacaggtaccggaaagctgtcaatgatcaagaactgtccattcaggtcaacctttttattcatttcttgccgtatctgataaatcaattgcaatagctgacgtgaacgccgattaaaacgtgagtgtgataaacaattgaaacattcacagaatcttctttgtgattcaattcctgtcttagcttgccagataagtaaagccaaaatcagactgtccgtagttttaatttgatcaatatttcgccgatgagtaaactcagccggtgcatacaaacgataccagtgccgacaaattatcactaaatctttaaaactaacttgtaaatggtggctaaaacgcttaagcttaaggcagttcaatcagatcagactcttttctattattactatttacaagtcgagtctaacaagattggacttttttattaactaaaacgatttaactagcaccacgcgtatacatcatatttcactatgttacacaacttgataaagcatcattttactttgtatttccaaaacagtttaacaaaaaatcatcagtaatcgcgcttatacaaaaataatcgatatcattttgccaactatgatatcgattatttacatgctgtttgatattgaatttttttattttctagatcgaaccagttaagcccgcaaatttccacttatctggattctcatttaacatgatctttaacctaattagtgcctgtggtaatttaaaaccatgtactagtgaataattattcaaatcacggttcagttcaaatactaccttatcaaaattaacaccctgagttaacttgcttaaaccttgattgattaacttcgttgcatctcgatcatttacagtctcttgtcttaattcctcaagaatttttttaagattttgtccattatcttgcaattttaagtcgcttccttttaattaacctctactgccccatggtccatattgtaaccatccattggctacggtttgacccgctttaccccaaattgcaccgtaatctgggatagttttatgtgtcttagtattatacaacatatatggagttaatcgaataattttaccaccaacaactctatttagctcaatattatttactaccttaaaattcttcatttccaatacctccgataaatctttaagcctgcctcgcttagtacttctaagcgcctcatcaacttacatatataactttaccagaatagcaggattttctatgacattgtcataaactgacaatattcacatcatattctgctaaagtacataatatgaacaaaactcatttagaatttagcaccctggatctaatataattaaagtagctagctcttcccgtaataattgacacttttccctgcatcccataccgcaaaaaatttctctctgacttggtagtttttaccatagtttccacttcaaacatacttatttttttctgttgaacagggtaagtacctatattagtaatttttccattaagtatttcagatgttccctgcttattttcaatattaaacttcatacgttgacccttatctagcacagccacttcagagctaggaacgtacgttattactcttaatttctttctatcccttatatcaggcatcgcaacactattcttattatctagatgaataataacattattttctaacataccttttttgccatcagctagagtgacactaattcctttagataatttttgcccttctttatattctttattctctaacgttactacccgatctggagtaataactcccatactattcatcacattttcatgcacagcaaaaaatgatccaataaatagtaaaatcacaaaaataaaagctggtaaaattatcattgtcgaaaagttacgaaaattatatgaatagaatttactactttctaaatcttgatcattcatttaatatcacctagcttttcaccaaatcataataatacccatgtttagccattaattcactgtgattaccttgttctacaatttgaccctgattcaataccacaatattgtcagttctttcagcaatagctaaacgatgcgcaataaatataacagttttattctttaacctaattaaattatcaaccacttttttctcagtaattgtatcaagcccacttgttgcttcatcaaaaatcaataccttagcaggtgaaagtaaggccctagcaattgttaatctttgcttctgaccacctgacaaaatcttagcattttcatctaattgtgtattaaatcctaatggcaatttttcaatgtcattctttatctccgcgatttggcaagcttcttctatctctttttcagttatattcttacgacttcccaacaaaagattctctttaatggtacctgcaaaaatatatggagtttgtggcacataattcacatatgagcataaaacatgcttatttatacttctagtcgaatgaccattaaaagttacttttccttttgtgggactgaaaaaatcaaccaacaatttaaccatagttgacttacctgatccactcattcccacaatagttaatttctcattatctttgatcgtcaaattaatatcttttaagacatcttcaccatatccataacgataatcgacatgtgagaaattaatgtctccatttaaatcatgactatcattaactgaagttttgcccttaaattcactttgaactaaataaacttcatttaaacgattctgagctacatttgcagcttgaagtgtaggttgcaagttaataatattttgtaatggatcaataaaatatgataataatgcattaaatgccatcaattcaccaatagacatctgattatgcattacaacacttgcccccacccaaagaataatgacattcagtgataatctaataaaagttttcaaagcagtttgaaaagcttctgttttgctatacttaaaagctttttttaaataatcaacaaactgactatcaatttttcgataacgtacttgttcactgtttaatgctttaatcgtctcaattccttgaatatcttcaataattgatgaactaactaccgcattactttccatctggtcattatttaatctttcaaacctttttgaaaagccgagaataacaatagcatagagtggtaatgaagctagcgtaatcaaaaacaatgtcatgttttgaaccgccaaaattatacccattaaaattacaattgaaagatcaaggaataatgaaatcaccgtacttgccaatgcatctataattctacttgcatcagaaaaacgagaagtaatctcaccagtttttctggtagtaaaaaattccatcggtaattcaaaaatatgcttaatgtattgtaaattaagatcgattgataaccgctgccccaaaacattcaataaaaattgctgaccatatgaaaaaattgagttaaagacatatgcaatcaataacccaatagctaaaacagataacgtggtaaatgtaccgttaggaatatatgtatcaatcaacccttgtacaaaatatgagctacagatactaatcagtgtcatcagcaaagcagctaaaataatgtttctaactaactttttctgtttaaacatataagggaataatgataatagattattctttttctcctttacaggcttaaaatctgccttaggcaccataaacaatgtaatacctgtccactctttttcaaacgcctttttggacatttttttaattccactagtaggatcaggatcggctacgattatttttcttttagtacttttaagaactacataataatgtaacaatcctccatcttttatcacatgaacaataaaaggatattgaatatctttcatattgaataaggacatatctgcttttaccgcttgaacatccatattgaatttttccgcagttttaactaatcctaaagcagtagttccttcagtattggttttagcaatatgacgtaaatgtgctattgatacttgagaatgataattctttaagatcattgctaaacaagctgcaccacagtctgtttcatcgatttgtggaacataaattgatttatacgttaacatgcccatcatttatctctttctgcttagctaatttctctgttttataattatatctagcaagaaaatctttcatcattttcacactactacgtgaaaaatcttcaacatccccattaacaaatgagacacgatgctgtttcaaatcaatcgactcaatgttcttcggattcaccaaacaagactggttaatcttctctaacataggattttctttagcatattgattaatactacctaaaagttgcatttcacctgtcgtcaagatcattaataacttgtgcggggttatagttgttgaaatataaataatatcatcaatattgacattcctagtttgacgtccaattttatacgaaaaagtcattttcttcatataattgaatttgtgtaagttgtagatagctacttctacagtctttaccatcatctgtctaaatttatccaaatcagatgtttttacaatgtagtcaattggacctaatcgtcttctgaatgtaattaatgataagtctgcatgactagttacaaagataatttgagctcgttcatctcgctttttaattaaggcagccagatcaaagccagtatcttcttccgtatcaccgcctaattcaacatcaagaaagtagataccaccatctaatttatgtttcttcagataatcaattgcacccatgtaatcagttgcagatgcaattgaaaattcaatttcttcatcatctgacaaaatcatttccgcagcaccaagaattttcttagtttgctcaatttgattttgatcatcatcacaaataaatactggatattgcattttttatttttcagtcccactttcactatcaggcaaaattgttaaatcaaaagtaaaccacccatcatcaacatagtaattaacaatcattgaatcttcatatttatgagtaatttcttttacattcgctagtcctaaacccatatgatgtttcttggttgtataattcttttgacttattttatctgtcgctactccactttttctaacgcgatttcgaatttcaaactcgaaatcgccgttttcttgataatacattgcatctattcgcgcactattagagttacctgtttctttgatcaaggcctgactttcttctgcagcattatcaaacgtgataccaattattctgaccagatctaaaatattaacactatcaggaattcgagaaatgtcgtgttcacaatcgaaactataatctagacctaaactataaagtttagacaacttagcaattgcgatacttttcaagttcttctcatggatatgatttacaccattatatttacgcaaagcctttttattaaattgcgtttcagtatactgatcaagtatttttacaacttctgcagtattaccttcttgagcacttacttttaagccatttaaaatattttgatagtcgtgtttgaaacgatgcaaatcatcttcatttttatcaagataatttgaatattcctgtaattgttccatctcagaactcaattgctgctgtttaagaatcagttccttattttctgcttcttttgcttttctatcagcatttgctagttcaagctgaaatttttgctctttttgttcttgtttagttagaaggcctttttgcactttaatgatagctatataagtaattacagagaaaactatctgaagcactaataaactcaaagacacttcaaaaactatagtcatatgtgtacttttcaatgctaaaaaatacacaatagagcttgataaataaacgtaaaatattaatccaataaaaatcgaactatttcgatcatttagtaacttacgaatttttaaataatacttttgaattataactataattacgaattccactagcaaaaatacaaaagtcatgctactagaactaatatcaaaaattaatagtattatttcagcactaattgttataagaagatctaataattcaaaaaataaaattgccccaaaaataaattttacttttttctctttttttaccaaatatgaaaaaaggaatattaaaaacgcttgaataatatctactaaaaaatcatctatttgtactacactaccagctaatacgcatgttccaataaaaactatcgaaaatgcataatcttctctcttaaacttccagcctgacaatcgataaaaaatatacaaatcaattacaggagaaaataaagcttgaaaaaacattttctattttaatccaaaaattttcttccagttaaaatgatttctatgttttttatttattgtgatatcgttaagagcaaaaaaactaactgtaggatcagcaaatccacccttaacttcaactaattccttttcattcaactttttcataattcaaatttcctttcaattaactaacaatttttacactattaatgttactacacacataatctcacaactaaagtcgtcaaattttgcaccattcaaatcatattctgcattttcatttaaaatgttcctccaccagaaccatttccccatccccgagaattactcttgaagaaatgccgtctaatttttgaccgtcctccaacaattttttctagaatcgaagtcgacaattttcgcatgatcttcctctcctttacttaaaaattattatagaaaaatcataaacctattctgtttatcaaaaatcagctcatcaaatcttgcaccattttgatcatattttgcaaaaaatgatcgatattgtacgagtactatccctccggccaaaaaagatcatccaacgttttatccagcgcctgacaaattttgatacataagttaatcgagggattataatttcccttctcaatcgcagaaattgtctgtcttgaaacatcaatctgctgcgccaaatcttcttgcgttaagtctttaccgactcgtgcagccttcatttttaaatttttcaatccttatcactttccttatcacgatggagttgaaacaggcttactactccaataatcaaccaataaatccccataatgttcagcgcactgttaaagtcatcaatatatcctagaatcaagcaaataccaagtacaacatatagccaactatttgccttaacatgctcttcattaaatgcaaaatatgctccatggactatatcgtaaactgacatcaccgttaatgacaacataataattgcaaagttaacagcaataccatgctttgtataaaaatccgtctgcatgaataaagcagaaattacttctccaacgattaacacaagaaagccatacctgtcaccacgaccacgaatcaattcctgtcgttcatcatactttgccgcacgacgatttcccacgaatacaacgactaagatgaaagtcataactgcaaacaagcttgcaaaagccattaattttaatatttcaaattttgacattttacacatccctttcttttaatagtttgatattaagcccatatttgcaaaatgtaaagtatgttttacatttttactaataaatttgtatttataaaaactagcattaacataatcggtatcatttcgtgagatttgataccgattatttgttaatgatcctgatttttcaaaaatttccttgacttcttcttttcatcgtcgtattataatgacaattaaattaataaaagcttagaagagatgagtaattacttaagacttctgcagagagtcggagttggtgcaagccgatgtagtcgatagtaacgaatatggtcttggagctattttaaagagcaagctattaagtaagcaatttacgagtgacgatcgttaccccgtccgagtattcccaattttgggagcacttagtaaggagttagttgtgaagctaacttgaatttgggtggtaacacgcttaggcgtccctagcatagaaattctatgctaagggcgctttttattttgcttatttaatttttcagaaaggagccagacaatggataaacctatcaaaactacaagttcacaaatcatcatcagtaaaaaggcattcaaccgaatgtgcactattgtctggttgatcttgatcatcatcggacttttcatcgttaaataaaacatcgaagcaaaactaaggagaaaaattatgacagaattacattacgatatcgttggtagctttttaagacctgcagaattaaaaaaggctcgcgcagaatttgaagaaggaaagattaagcaagaagaattaactcatgttgaaaataaagagatcagagaattagttcaaaaagagattgatcatggtcttaaaatcgtaactgatggtgaatttagaagaagttactggcacctcgatactttctggggctttgggggtattaaacacactaagcaggcccacggctatttcttccatgatgaagaaactcgtaacgactctgcccaagttgaaggtaaaatcaaatttactggtaaacatccagatctttcatcatttgaatacctgaaaaaagttgtcgatgaaactggcgctaacgtaattccacggcaaagtattccagctcccgcacaattttacgcagaacttgttcgtggagaagaaaatattgccgcgcttaaaaagatttatagctcagaagaagatttactcaccgatatttctaaagcataccgagacttaattttagccttatacgatgcaggatgtcgcgacattaaactcgatgactgtacttggggtatgattgtagataagcgctattggaaaagtcatttacaagatgacttttcattagacgaccttaaaagaaaatacttgaagcttaacaatgatgcaatcaaagatttgccaacagatttgcgaatatcaactcatatttgtcgcggtaactatcactcaacttgggcagcccaaggaggttatggtctagtagcggactatgtttttgctaaggaaaatgttgacgccttttatcttgaatttgacaatgatagatctggcagttttgacccaattgcacaaattcctaacgacaaacttgttgtcttaggtttagtaactagtaaaaaagcagaattagaagatccacaaaaattaatcgctagaattaaagaagctgctgaattccacccactaaatagtctcgctttaagcacacagtgtggcttcgcctcaactgaagaaggcaacacgttaaccgaaaatgaccagtggcaaaagatcaagttggttgtcgacactgccaagcaagtttggagctaaatggcaattaactagttaaaataaagataaatagatttagacaaaggagaaaaaaatcatgggaaaagttgaaagttttgaattagatcatactaaagttaaggcaccttacgttcgtttaatcactgttgaaaaaggccaaaaaggtgaccagattagcaacttcgatttgcgtttagttcaacctaataagaacgccattcctactggcggcttgcacacgattgaacaccttttagccggtcttttacgtgaccgcatcgacggctacattgactgttcaccatttggctgtcggactggcttccatcttttagtttggggcaccccatcaactactgaagttgccaaggcacttaaggagtcattagaagaaatccgtgacaacattaaatgggaagacgtaccaggaacgacaattgaatcttgtggtaattatcgcgaccactcattattctcagctaagcaatggtcaagagatattttggctgaaggcatttctgatgacccatttgaaagacatgtagttgaataaaattttgactgtataatcaaaaagctgataattcatttttacgtgaattatcagcttttattttgtcaataattatatttacttactattcattcaacttcaaatatctgctattgaaagcataaatacatattagcataataattattactggaacattcatcataattactccagcaatattaggattgcccaaatccgcttttgccaactgtggagaaaaatcttgcaaaaagtggaagattatacaccaagtcaagccattggtccaaatgtgcaaataactaaaaattaaataccctagtagtgaaactaaaatgtttagcaaccacagcaaaaactgtaacgtacgctactaagataaccgttgccataacgcgctgatttttacccaatagatttaataagactgggtaaagctgataacatagctgaagcactacttccagtatgattaatccaattactgcttttttcacattatccttattatctagttcaacttcatcagctaatgccaaataatacttatctttcataagttcacccattatttttttatatccattgttttatgaaattgaaatagtgatacaacaaaaatccagtcttgatctgtaatcaaaattggattctaaggtatcctgaacctgatcaaagcctttgtggattcgattgaaataacggtcattgtagctcattgcctgaatgccaataaaagtattaagcgactgttcagttggaaactctgctttaggcttagctttacgcttgataacgttgttaaaggattcgatcatattggtagagtaaattgaagccctgatctgcttaggatagctgtaaaagaccagcagatcaggttcaatctctttgagatttctgatgacatggttgtacgctctgttccacttgtcatagaaagcgtgcaagactttgatcgcggcttccttatttggctgttgatgaatttgcttgaattcattcatgatcgttttgcgatcatctacgcatactttagcgcaaatattgcgcatgacatgaactagacagcgttgaaaatgagctttcggataagtctgctccagcactgtcttcatgcccacaacgccatctgaaagaaagagctaaacttgttctagaccgcgagacttcatgtcttgaaacatttccgtccaattctcgacgttttcgctgggagcaatgcggtaatcgatgacttccttgtgaccattaggcttgatgccaatggcaatatagactgcttcacgctcaaacgtttctcggcgcaaaggaatgtaggtagcgtccaaataaacgcagaagaacttgtcactgagtttgcgctgatgataggcctcgacttttggaatcatctgcttggagatgttagagacctgagctgggctgtaatgactgccatacatcttttcaatcaagtcggctatttctctagtggttacgcctttggaatatagtttgataatcatgctttccaagacattggagtgctgcttgtagtcagggagcgtgtgctgatgaaacatgccgtttcgatccctaggcacctgaatttcaatctcgccaaattgcgtatcaaccttgcgaaaataagcaccattgcgtgaattgcctgtattccagccagctctggcataaggatcatagcctaaaaacgcagtcagttcagcttctaataggtcattaactgcttgctggagttcttctttctgtatgtgtttttttgttcaaaccaatcatacgagaaaggaactcctttttctaatgttttaagaaattaatttaaggaattattcatccttacacaaactattttacagtctcctttttccttaactccaaatatcttttattaattgtccaaatacaaattaatacaaaaattattattggaaagtacagcaatattactaagccaatcttagaaattccataatttgtacttattatcttaggcgaaaaatcctgcagaaagtgcaatgctatacaccaagccaatctattagaccataatcttagacaactaagaatcaaaccaaaggctagtgtaaaaatcatttgtcctacagttgaaataaatgattgactagtcaagttattcaagtgaattaagctaaataaaattgaacatactattgaggtacataaaatgtcatatttttcttcacaaaaaaacaacagaaatgcattaaacaatattcctctaaatataaattcttcaaaaactgctgatatcaacgctgataaagcagcaaataatatttttgaaaattgtaatttaaatagtggaaacatattcataagctctatcgaaattaaaaagattaacaagataagataagcaaacattattcttcctgatgtaccttttagccttaacttttgattaaacgtcttagttgttaaaataaaatgtttcgccgtatatgtataaatagttagaaaagcaattagcattaatttataaatttgattattaccaatatttaatcgtacaacacataaaccacttattaaaagtatagttgctaccataaataatttggtaattgttctctttattataattttatttccaagttctacgtcatccgctaatgctaaataataattatctttcataagtttattccagcaacatatttttacatgaaataataaggttgataaaccaatttaaatttatcaaccttattacttataattttgggaagtcatgaatgctaataggtccacttggcatagtttgacggatacttcgtaaaactctaccccaataacggccattgtagtaatcgtgagaatgacctttaccacctaaaattcttttcaattgctttacagataattccttcatctcaaatattcttccttacttacctgctaaaccatcacgaagacctgtcataaattgacctgtacctctttgaactcctctccaccaagagccaaaattaaagccacctttacgacgaccgcctgagacattctgtaattcagtaacacttaacttttgaaaattattcattttaatacctctaatatattaaatcctcttaacgatgattattcattttgctttcttgatttagaaataaaactgaaaatatcagtcacatttacaatcaatgcaagaatcacgataattgctgatacccaaataccaagttgagttttaggaacataaagcagggttacaagaaaagcaatatttattaatagccatagataattcttcattttttccttcaccatcattctaagtacttaaggatacttgcaccaatacctactaaagtgccaatagctctaatatttctgccagtaccacgaccattgtagtagttttgagaatgtctaccacctacaactctaactaactgaactgaattcaaattttcaaaacttactgtattttccatttcaaatacctccaataaatctttaagtctgcctcgcttagtagttctaagcgtctcatcaacttacatatataattctagcaagaatggcttcttttccacgttatcatcgtaaattgacaacatatgcatcaaatttagccacaatacacaatatgaataaaaactggcccatatataaaaataatcgatatcaaatccacagaaatgatatcgattatttattttttaaatgatagataatattaggcatatttacatgatgctccaattgatgtttagcgtagagcaaaatttctcgttcattttgcttaactctttcatccatcaataaatctgtaacttgatttagtaaagctacttctggattaaatttatttttacttgtcataattatttacctctaggcgcctcatcaacttacatacgcatggtgctagttaaatcgttttagttaataaaaaagtccaatcttgttagactcgacttgtaaatagtaataatagaaaagagtctgatctgattgaactgtcttaagcttaagcgttttagccaccatttacaagttagttttaaagatttagtgataatttgtcggcactggtatcgtttgtatgcaccggctgagtttactcatcggcgaaatattgatcaaattaaaactacggacagtctgattttggctttacttatctggcaagctaagacaggaattgaatcacaaagaagattctgtgaatgtttcaattgtttatcacactcacgttttaatcggcgttcacgtcagctattgcaattgatttatcagatacggcaagaaatgaataaaaaggttgacctgaatggacatttcttgatcattgacagctttccggtacctgtttgccaaccaattcgcaactatcgtgctaaaatttttcgcggttatgccaacattggttataaggccaccaagaaaatttacttctatggtttcaaagttcatgccattgttagcgatgacggttacattcttgattatgtcgtaacaaaagcatcagttcatgatgccaaggagacagttgaactgctggaaaatgcccatccatctaattactatcttcttggcgacgaaggctatttaggcaaagaactgcatcaacagctaaaacaaatgggttatgaactttggacaccatatcgtaaaaatatgacaggagctaaaaagcacaatgatcatcaattgatggctattcgcagaacaattgaaagcgacttttcgcttctgacctattacaatgccgagaacaatcgagcacgtagtctgataggctttcaaagccggttggaaattgcaattttagcttataatttggcttattgtctagaaagatttaactagcaccacgcgtacttacatatatattctaacgagcttggtctttcctccacattatcgccataaactgctaacatataaatcaaattcggttgtaatggcaaatttatcagtattactttagcaataaaaaaagaacaacttcaataattgctattcttattaatctacttagaatttgaaactgtcaaatcttttgtgtaaatagatctttctcgtaaattgattttttaattatttatttaatcaaagtaggattctaaggtgtcctgaacctgaccaaagcctttatgaattcgattgaaataacggtcattgtagctcattgcctgaatgccaataaaagcatcaagcgactgttcagttggaaactctgccttaggcttagctttgcgcttgatcacattgttaaatgattcaatcatgttagtcgaataaattgaagctctgatctgcttgggatagttataaaagaccagcagatctggttctatgtctttcaagcttctgataacatggctgtaaaccttgccccatttggtatagaagtcatgcaggacagctgtggcttcttctttgtttgtctgttgatgcacctgtttgaattcgttcatgatcttttcacgatcgtcgacgcgtactttagcgcagatattgcgcatgacatgaaccaaacagcgttgaaaatgagctttaggataagtcctggccaaggctgttttcatgccaacaacaccatcagaaagaaaaagctcaacttgctttaagcctcgggatttcatgttttgaagcatatctgtccagacttcaatgttctcgctaggtgcaatgcagtagtcaatgacctccttgtgcccattaggcttgatgccaatggcaatatagactgcttcacgctcaaatgtttctcggcgcaaaggaaggtatgtcgcatccaaatagacgcagaaaaacttgtcgcttagcttgcgtttgtggtaagcctcaacctttggaatcatctgcttggaaatatttgatacctgagctggactgtaatggctgccatacatcttttcaattagatcggctatttccctggtggtcacgcccttggagtaaagcttgataatcatgctttccaagatatccgagtgctgcttgtagtcaggcagcgtgtgctgatgaaattgaccgttgcgatcccgaggcacttgcacttcaattgggccaaattgcgtatcaactttgcggaaataagcaccatttctagagttgccagtattccagccatttctggcatagggatcatagcccagaaaggcggtcaattcagcttctaacaagttattaacagcctgttgtagctctttgcgcaataaatcatttattttgtctggattgaatagagcttgagcaaaatctttggtaaaatcattcatgaaggagttcttctttctgtatgtgtttttttgttcaaaccaatcatacgagaaaggaactcctttttctaatgtttaaagaaataaatttaaggaatcattcatccttacacaaactattttacagtctctagaatttaataccttagacttaatataattaaagtaattagtcttaccagtaatgattgtcacttttccttgcatcccatatcgtaaaaactctctctcagacttagttgtcttaattaaaatatcaactttaaatgcattcatgcctttctgttgtacaggatatgtacctaaactaataaccttaccattgagtattgtaagtactccctgcttatttttaacttgaaatcgaactttttgtctttcagcaagagtagctacttcatcatctggaatgtaggttactattttaagactacctttatctttaatatcgggcatagcaatactatcttcatcatctaaatgtacgataatattattttttatcagtcgttttttgttatcagccaaagtaataatagtaccctttgaaatcttttgtccttctttatatccattacttaaacttcccacactaaataagccagtaatctcttgatcttgcttggctttaggcttctatattatttttgctagttttctttaacaatttttgcatgtatttgggtaaacgattgataaagtcagccgtgaattcagctatttgtgcttcactggcatgaaagacttgctttacgctggccagcattgcatcagtaatcaattgcaaggaatggctaaaagtaatgtccgccagctcatcaatcatgcaatagaacagctcgcctagcgtgcgttcatcttcatcgtcccgcttggcaactgacataagcatgtagcgagtaaaaactatggcaacatgagcggtcaaagcatcgtaagacaggccatgatattccgtacttagttttagataacttttgcaagttttgaaaaaaccctcaatatcccaacgcttgccgtagttgcggataatttcatcttcgctaagcgacatgtcggtacaaatgattgccagccaatccttgcgattggcacggtttctaacgcagacaatccgtgcatctattttagcaccgtctttgtcctggcgtccgactttgactgggattgacagcaggtagcgagaacggccgcatcgctttttacagctgcgataaatctgtttgatgtttttgcgttctccctcaaattcatatttgattttggagctaaccttaaccatggcaatcacatccagcttcctttgcttgagctggacgatttgatgtggatttgagaaccagctgtcaaacagcacgtacttggcttgatgacctgctttcatagcttggtcgattaaattaaccatcacgtctgtgcctttagtccgggcaagcatacgtctttggccagcaatggtgcgctgatcaaaaactttattttcgccaatcatattctgtagcttctgagaagacagcagcactgaattgattggcatgaaagaagctccatcagtccagcccagggtcatcatgcgaaaacctttcttgtaagtcattgatacatggtcaaaaactttggcgactaattctgttttcttgaagccggtcctagagaagtaggaatcatcgacaacaaagcaatcagcccgtttttctgaagtcaaagatcgcaagtggttattaatgatttgcgcagacagacgtgtggtgaagtggagccaattgacgtgaacgttgcgcataaaacggtaatatgagttcttggaaaaattttcttgaaaatgatccattttcagctgcatatataagctgcggtcacgaaagacattgcttaaaacgtaaagaaacaagctgaacaggctaatgcctttttccttgcggaagccacattttctcaacagcttgatcacctgaaacttcttgatgaagctgatgattgagtttgaaaatagttgttcattttgttggtcaggagatggtaaaatagacattggcacaagcctttcatgcaaataaattatgttttggtcaatataattatagcaatgaaaaggacttgtgccttttatatttgtcaaaacacgcagaatcacaatgaaacaagcaattttgcgtgtgggaagtttaagtccattattttttaaagaaactatatggtctggttcaacaacacctatactattaatcacattttcatgcacagcaaaaaaagaaccaataaacaacaaaattactaaaataaaagccggtaaaattatcatcgttgaaaagttatgaaacttatatgaataaaacttactactttctaaatattgatcattcatttaatatcacctaactttttaccaaatcataataataaccgtgcttggccattaattcagtatgattgccttgttctacaattcgaccttggtttaataccacaatattgtctgttctttcagcaatagctaaacgatgagcaataaatattacagtcttatccttcagacttattaaattatcaactacttttttctctgtaattgtatccagcccacttgttgcttcatcaaaaattaacaccttagcaggtgaaagaagtgctctagcaattgtcagtctttgtttttgtcccccccgataaaatttttgcattctcatctaattgagtatcaaatcctaaaggtagcttctcaatatcattttttatttctgcaatttgacatgcttcggctatatcttcttctgttatattagaacgacttcctaataaaagattttctttaatagtgcccgcaaagacataaggagtttgtggaacataatttacatatgaacgtagaacgtgcttatttatctctttagttgaataattattaaaagttactttaccttttatcggactaaaaaaatcaaccaataacttaaccaaagttgatttaccgagactgtaaaatagtttgtgtaaggatgaatgattccttaaatttatttctttaaacattagaaaaaggagttcctttctcgtatgattggtttgaacaaaaaaacacatacagaaagaagaactccttcatgaatgattttaccaaagattttgctcaagctctattcaatccagacaaaagtaagtgtcaatgtttttgcggtagcctttaaaccattagtctaaccttaatttcttaaatatttatatgacttaaatttctgcttagcttgcttaaataactattgccagctacctgtgcggttaatgcgccatgctggatgcctaaatgaacttcatgacgcttctttaagctgtcacgggccgctgcttttaattcctgttcagtcaatacagttatttctgaatcttcaaactcgctgctaagccaaaattccagctctcgattcttgatgcagcttaagatcctaagcatgccttctgctccagattttgaccatttcttgccttgccccttaacacggtaggtatacttgcggtggttgctctcgcagcagccaatggctttagtcacagtcagttttcgtttcttaaacggcttaatatcgtcccaatgacgatcaatataattccttaggcgccccagataatcatgattgagctcggtattcaattcatcaattagtcggctttctgcagtggttaggatagttttaactttgtcatagctgtatttgtattccaaagcagaaatcagcttgccttgcaggtcaggcgcaaaatatagcctttctttgattttcttatttaggtgaaagacatccaagaaatgctcatgacgcttgcatagccctacaatgtcatcgaagtctgttttggcatatccagcaccgccatcggcgttgctaagaattacagtatcagaaagatcataagtattggccaggtactccttggcttcgttcagcgcatcaagtcggcttaaagaaacaaattccttggcattgattcgctttctgcgtttcttgcttatattgacaatgccttcacagacctgatagcgatgaaattccaaccggcttttagtgcctttgatcaccacgccatcgccttcaagatacaaaactgggacctttttcttagtgcctgcggcatcatatcttgaatctgcttcttggcccgctttaatatttttcccggccatttttaccaaattgcccacctgcatatggctaatattaaagccagacaggcaattgactgctagagcagtattgcgataagtggcaacgctgcttacttctaagatgtttttgactgctaaaatactgtagcgcttgtatttgtcaaagcccattaattcatccaagggataccttgcttgtttgcctgggcagacatatcttcttctgacatacctaacttcgccaaaagccatattgattgagcgctcattcttcttatcaatctgatagccctgtgctttaaccttggtaatcatttcatcatcaactttagctaaagccaaggccatgatttccttaatcaggtttaagaagaaacagattatttttctttcacgcttaatataattatcttcagactttataatatttgcgatttcagttacaattgaattcataaaagaccagcttctaatgtgttttttgttcttaacatcagactactggtctttttgtttgagctcaagtccaaattcaaaggacttgggcttttttaattatttattcaacttaccgtaaaaaattatacacttagcagacaaaataaatgatttattgcgcaaagagctacaacaggctgttaataacttgttagaagctgaattgactgcctttctgggctatgatccctatgccagaaatggctggaatactggcaactctagaaatggtgcttatttccgcaaagttgatacgcaatttggcccaattgaagtgcaagtgcctcgggatcgcaacggtcaatttcatcagcacacgctgcctgactacaagcagcactcggatatcttggaaagcatgattatcaagctttactccaagggcgtgaccaccagggaaatagccgatctaattgaaaagatgtatggcagccattacagtccagctcaggtatcaaatatttccaagcagatgattccaaaggttgaggcttaccacaaacgcaagctaagcgacaagtttttctgcgtctatttggatgcgacataccttcctttgcgccgagaaacatttgagcgtgaagcagtctatattgccattggcatcaagcctaatgggcacaaggaggtcattgactactgcattgcacctagcgagaacattgaagtctggacagatatgcttcaaaacatgaaatcccgaggcttaaagcaagttgagctttttctttctgatggtgttgttggcatgaaaacagccttggccaggacttatcctaaagctcattttcaacgctgtttggttcatgtcatgcgcaatatctgcgctaaagtacgcgtcgacgatcgtgaaaagatcatgaacgaattcaaacaggtgcatcaacagacaaacaaagaagaagccacagctgtcctgcatgacttctataccaaatggggcaaggtttacagccatgttatcagaagcttgaaagacatagaaccagatctgctggtcttttataactatcccaagcagatcagagcttcaatttattcgactaacatgattgaatcatttaacaatgtgatcaagcgcaaagctaagcctaaggcagagtttccaactgaacagtcgcttgatgcttttattggcattcaggcaatgagctacaatgaccgttatttcaatcgaattcataaaggctttggtcaggttcaggacaccttagaatcctactttgattaaataaataattaaaaaatcaatttacgagaaagatctatttacacaaaagatttgacagtttcgataaagttgtaaatgtaccattaggaatataagtgtcaattaatccttgtacaaaatacgaactgcaaatactaatcaacgtcatcaataaagcagctactatgatatttctaaccaactttttctgtttaaacatataaggaaaaagagacaacagattattctttttttcttttacaggcttaaagtctgctttagggaccatgaataaagtaatcccagtccattctttttcaaatgcctttttagacatttttttaattccactggtagaatctggatcagcaacaattatctttcttttggtacttttaagaactacgtaataatgcaatagtcctccatcttttattacatgaacaataaaagggtattgaatatcactcatgtaaaataaggacatatctgctttaactgcttgaacattcatatcaaatttttcagcagttttaactaaacctagcgcagtagttccctcagtatttgttttagcaatatgacgcaaatgtgctatggatactcgagaatgatagttctttaagatcattgctaagcatgcagcaccacaatctgtttcatcaatttgtgggacatagattgatttgtacctaagcgaaattaccattttcttcttccttcttagccaatatctcagttttataattatattcagatagtaagtctttcatcttttgcacactagtacgtgaaaaatcctcaacatctccattaataaactgtacacgatgttgcttcaaatcaatcgattcaatattcttaggatttactaagcatgactgatttattttctctagcattggattttctttagcatattgattaatactacctaggagttgcatttctcctgttgttagaatcatcaataatttatgtggagtaactgttgttgaaatataaataatatcatcaatattaacgtttctagtttgtcgaccaatcttatatgaaaaagtcatcttcttcatatagttgaacttatgcaaattataaatggctacttcaattgtcttcaccatcgtgtgtctaagcttatctaaatcagatgtttttacaatataatcgattggaccaagacgtcttctaaatgtaattaaagataaatcagcatgactagtaacaaaaataatctgtgcacgttcatctcgcttcttaattaatgaggcaagatcaaagccggtatcattttcagtgtcaccacctaagtcaacatctaagaaataaataccaccatctaatttatgctccttcaaataagtaatagcatccatataattagtggctgtggcaatcgaaaattctacttcttcatcatctgagagaatcatctcggctgcaccaagaatttttttagtttgctcaatctgattctgatcatcatcacaaataaaaactggatatttcatttttagtcctcaatttcattttcatcatcaggcaaaattgttaaatcaaaagtaaaccaaccatcatcaacgtaataattgacaatcattacatcctcatatttatgagtaatttcttttacattggctaatcccaatcccatatgatgctttttagtggtaaagttcttttgactcattttatctgttgctatagtagcttctctaactcgattacggatttcaaattcaaaatcaccattttcttgataatacattgcatcaactcgagcattattagtactatctgtttctttgattaatgccatactttcctcagctgcattatcaaatgcaataccgataattctaactaagtccaaaatattaacgctcttaggaatttgagagatgttctgttcacaatcaaaactataatttaaatccaaactatataacttaaacagtttagcaattgcaatactttttaaatttttctcatggatatgatttacgcctttatattttcgaagagctttctgatcaaactgcgtattagtatattgatcgagtatctttacaactttcgtagtgtcgccctcttgagcactaacctttaagctatttaaaatattttgatagtcatgtttaaagcgacgtagatcatcttcattcttatcaagataacttgaatattcttgcaattgccgcatttcagactttaatttctgctgtttaagaacaagttctctattctctacttcttttgcttttctatctgcatttgctaattcaagttgtagcttttgttccttttgctcttgctcggttaaaagtttcttttgaatattaactaccgtcgaataagcaaatatggagaaaattatctgaagtattagtaaacttaaagatacttcaaataatgtcgtcatacgattaattttaactgtgaaaaaatagactatcattgtagaaatataaatatatgtagtcaactctacaaaaattagtccatttttattcattaataagttgtaaatatgacttttgttcataactatcagtagggcaaaaattattccaagaataagtgatagcaaataaacatcattactaaaaaagctaagtctggatccgaaaatagtcataattattgagcaaaataaatcaattaatccaaaaataagtgcagctccccaaaaaagctgaaactgtcaaatcttttgtgtaaatagatctttctcgtaaattgattttttaattatttatttaatcaaagtaggattctaaggtgtcctgaacctgaccaaagcctttatgaattcgattgaaataacggtcattgtagctcattgcctgaatgccaataaaagcatcaagcgactgttcagttggaaactctgccttaggcttagctttgcgcttgatcacattgttaaatgattcaatcatgttagtcgaataaattgaagctctgatctgcttgggatagttataaaagaccagcagatctggttctatgtctttcaagcttctgataacatggctgtaaaccttgccccatttggtatagaagtcatgcaggacagctgtggcttcttctttgtttgtctgttgatgcacctgtttgaattcgttcatgatcttttcacgatcgtcgacgcgtactttagcgcagatattgcgcatgacatgaaccaaacagcgttgaaaatgagctttaggataagtcctggccaaggctgttttcatgccaacaacaccatcagaaagaaaaagctcaacttgctttaagcctcgggatttcatgttttgaagcatatctgtccagacttcaatgttctcgctaggtgcaatgcagtagtcaatgacctccttgtgcccattaggcttgatgccaatggcaatatagactgcttcacgctcaaatgtttctcggcgcaaaggaaggtatgtcgcatccaaatagacgcagaaaaacttgtcgcttagcttgcgtttgtggtaagcctcaacctttggaatcatctgcttggaaatatttgatacctgagctggactgtaatggctgccatacatcttttcaattagatcggctatttccctggtggtcacgcccttggagtaaagcttgataatcatgctttccaagatatccgagtgctgcttgtagtcaggcagcgtgtgctgatgaaattgaccgttgcgatcccgaggcacttgcacttcaattgggccaaattgcgtatcaactttgcggaaataagcaccatttctagagttgccagtattccagccatttctggcatagggatcatagcccagaaaggcggtcaattcagcttctaacaagttattaacagcctgttgtagctctttgcgcaataaatcatttattttgtctggattgaatagagcttgagcaaaatctttggtaaaatcattcatgaaggagttcttctttctgtatgtgtttttttgttcaaaccaatcatacgagaaaggaactcctttttctaatgtttaaagaaataaatttaaggaatcattcatccttacacaaactattttacagtctcaaaaagcttgttagctttactctttctacttattttgaaataaaagaaaatacttaagatttccaacaaatctgacacaaattcatttatatatccacttgcatcccctaaggataaggctacaaataaaatgataagaaaaatatccgcatatttatatttttgtcttgcaacttgataaaagatccataaatcaaataaaggtgatacaacagcttgtgttaataaaagccacattagaacttcctactttagatgtaacatccacttaattaaattgtgtctatgcttacttgtaaagttagtaacacataaaaaactaacagtaggatcagcaaatccacccttaacttcaactaattctttttcatttaacttcttcacttaaacttcccacacgcagaatcgctccttttattgtgattctgcgttttttaacaaatataaaaggcacatgaccttttcattgctataattaaagtgaccaaacgataattctatgcatgaaaggcttgtgccaatgtctattttaccatctcctgaccaacaaaatgaacaactattttcaaactcaatcatcagcttcatcaagaagtttcaggtgatcaagctgttgagaaaatgtggcttccgcaaggaaaaaggcattagcctgttcagcttgtttctttacgttttaagcaatgtctttcgtgaccgcagcttatatatgcagctgaaaacggatcattttaaagaaagcttttctaaaaaattcttattaccgatttatgcgcaacgtccacgtcaattggctccacttcaccacactgctttctgcgcaaatcattaataaccacttgcgatctttgacttcagaaaaacgggctgattgctttgttgtcgatgattcctacttctctaggaccggcttcaagaaaacagaattagtcgccaaagtttttgaccatgtatcaatgacttacaagaaaggttttcgcatgatgaccctgggctggactgatggagcttctttcatgccaatcaattcggtgttgctgtcttctcacaagctacagaatatgattggcgaaaacaaagtctgtgatcagcgcaccattgctggcaaaagacgcatgcttgcccggactaaaggcacagacgtgatggttaatttaatcgaccaagctatgaaagcaggtcatcaagccaagtacgtgctgtttgacagctggttctcaaatccacatcaaatcgtccagctcaagcaaaggaagctggatgtaattgccatggttaaagttagctccaaaatcaaatatgaatttgaaggagaacgcaaaaacatcaaacagatttatcgtagctgtaaaaagcgacgcgggcgttcgcgctatatgttgtcaattccagtcaaggttggccgccaagacaaagacggtgctaaaattgacgctcggataatttgcgttagaaaccgtgccaatcgtaaagagtggctggctattatttgtaccgacatgtcgcttagcgaagatgaagtcattcgcaattatggcaaacgctgggatattgaagtttttttcaaaacctgcaaaagctacctaaaactaagcacggaatatcatggtctgtcctacgatgccttgactgctcatgtggctatagtctttacccgctatatgctcatgtcagtagccaagcgggacgacgaagatgagcgaaccttaggtgagcttttctattgcatgattgatgagctggcggatattacattcagtcattcacttcagctaatcacaaaagcaatggtggctagcgttgaaaaagtctttcatgccagtgaagcacaaatagcagaattcacggctgactttatcaatcgtttacccaaatacatgcaaaaattgttaaagaaaactagcaaaaatagtatagaagcccaaagctaagcaatatcaaagaattgccagcttatttgatgtgggaagtttaagttcttcataattcaaatcttcctttcaactctttaactttttacatcaccaatattactatgcattcaattttatacacaaagtcgtcatattctgtactattttaatcatattctgcatttttatttaaaaagcacctccaccagaaccatttccataaccatacgaattatttttaaagacgcggcgtctaatttttgatcttccaccaacaactttcttcaagactagaatagatagtttttgcataatttttcctctctttttctcaaaaaatactatagaaaaacatacacccatttggactccaaaaaacatttcatcatattctgcctcatttcaatcatattttgcaaaacatcaagttactcaatatgagacgcttctttcaattttatttaaaagatcactacttcgagtcctccatcttttcggtatcattttagctcatttgataccgctaaattaataatgataccgattaaatactaaaaaagactgacaattcatttttacgtggattatcagcctttttgattactcatgataaatatcttgaaccgccataccccaatatggaatatattccatatatcttttacttgcattcttatcatatggttttattaaatacgcttctaaacttgatgcaattgccttagatacttgagaagcatctttatctgataaattaaatgttttacgaattgaagagttactaatcttcatgtcatttacatatttcaaactagcatcccagtaaattgattcattcttttcagtaatagccaattcactaaatgctttttcctcacgaatagttacttgcgtagcagtggtacccttgcttaaaatttcgaccgttggtaaatgagcctcttctaatgaataaaccactttatcaattccagtaccacgtgattcagtaatatgaaatttacttaagatattagccaattcaggattacgggatcgaggtgggacgtctaaaaatctaagtggttcaatcaaaggaattcctggtgctgtgcttgctggtagtattgatttatcatgtttgaattttttaagacaccattatatacaaatttccagcaccaaaatcagaagatgtcgtcactgctatcttatgccagctaacattgccattcattggttgaggaacttggctctgtatcacctcagaaaaatccttaatttgatgtagattcaactcatttttacgtgaattatcagcttttatttatatctaaatcattcctgcaattaaaccaactacatataagaagacacagcaaactactaaatacaaaccgccccacttcacggtctctttcagtatttcgccttcatcaccttcgcggttaattgaaccagttgccacggcaatattttgcggcgacagcatccctgccgttgcgccagtcatgttcgatgctacaacccagtacttacttacacctaggtccattgcagccgacagttgtaaatttccaaagagaacgttagctgaagtggcagaaccagttaagaatgttcctaatgccccaataagtggtgcaaataatggataagctggccctaataagctaactaaggccactgctaatgcatcggtcattcctgcatagaccattactttggctaatcctacaattgcacaaaccgtaattgttgtcttccagacgctcttaattacttgtcctaaaatttgcatcattttcttaaaactaacgccctgaattgccccaccgattaaagtagcgacaaaaagcaatgtacctggagacgacaaccagctaattgacaaggtattcggatttttccccgtataaacaaccaaattagttgtcaccttattaagtaaattattaactgctggcaccaatgatgatgcaaaaataacgaagatgaaaactaagataaatggtgaacatgccttgagcatttctttagtacttggtttttctacatcaggttcttcttcctcatcatgccatctagttaataaaatcgtaattgcgattgaacaaagtgccccaacgattgctggcaattctgctccaacaaacttagccgcaattacttgcgggattgccatgcctaaacctgacatcaaggtaattagtccaacgcctttaattgctttaatagaaccttccgttaaaattactaggataaatggcaccagcacaactaaaacaaataattgcaaggtcacgatgaaggataattcttcttgctttaacccagtcacttcacccaaggtaatgatcggcaagccaattgcaccaaaagctgtggccgtggtattagcaatcagactgattactgatgctctaattggctccaagccaaaggcaatcaaaatcccagcggcaatcgccaccgcggttccaaaaccagcaattgattccaaaaagccaccaaagccccaagcgataatcaaaacaataatccgcttgtctgttgaaatcgtcgccagcatatcttgaatggtcttcataccacctgattcggtagtaacattatacgcaaataaggccatcacaattacgaacatgatcggccaaatgcccatgataattccttctagcgccccacttgccgtatctagcaccggtaatttaaaactaaagactgctaacaccatcgtcaaaattaagccaatgacacaagcgcgtgcagctggcattcgcataactcccagcgaaataatcaaccaaacgatcggcaacaatgcgatcgcaaatctaatccacatcaaagtcctccatcatcaaaagtgttgtactatattatttaatcatgatttgggtaaaaagttaaaataagacacaaaattttagttaaaattacaattttcacaaatttcacttgcaagttttaacaacaaactatataacaattaatggaaagtaaaatttctcacatcatgtttgaactactccgtggaatagagtagttctttttttgcgtaaaaaaatagccagaccgaattcagcccaatgtcattaagttaagacattgacaaattatcgacttggacttttaagatcattcatttgcgatttatcgcatttgaatgctcttttttcatgccaaataaacccaaatcttgtttagaaattaggctacacgatataaataatatacagctgatttgggtttgagatttcttttgtcttttcgtcctggtctgatcggaattgtgtaatgactaatttgaataagaatctttttaaagatttcagttgaagaagaaattatatacatagcctggatgacaaaacatgactgtttgaaattgatcgcatattgatacttgcattttttttgtggtacatatgcttgagcatcaatttgactgactgcgttaaacataatcatgtgggcatagatctccatttcaataaatctatcctgcttggaatgaaactgtacgctacctaaagcatatttcaactttttgaatgaagtttcaatgccccagcgcaaatggtagatttctttgatcctttttaagggataatcggctctatttagattagttagaacaactttccattcttctttgcctgatttaggatcattaattctaaatttacaggcacgaaattttattgtacataactctccaaagtcccagctgccatctttggtatttttagaccgatattttatatattgacggtaatgatggttaaccaaatgaacgttttctgtagccttatgggtttcataataataattagaggtagtcacccagcaagctatatccttatcacactcttgattaggcaactcagctacttccttaaatgcgccatatcccgttttagtacgtatgacataataacagttaggcaggcgattacaattttcaatcatgttaaagccggtataacctcgatccatagtaactatatatggtccgcaatttagctttttaagcatttgaacggcggctttacgttcatccatctttgacttaggctgaaagatgcagtcttgataagtattatttaacaggtcatagagtgcattaacatgaatttggcaatatggctttcctttatgattgagatttccaacgatattctctgatttaggattccagatttgattaaaatcagacccatcaatggcaaatatacgatatttatgatcaaataactggatattaaataaattctgattaaatacagttagaatatgcttaaaacatgcgggtgaaagctgacctttgcgttggacataagcggaagtactgactactttatcgttatttttaatagctttttggccaaaagctctaaacaactcactggtcaaatcttttccttgcatattaatagtagttttaatgactgtagctgcatctaaaaaccgcttcctagtgaaggcatgaggatcatcgataaaatcatgaatatgctttccagtatcattgataatttgatcaagacgatctaaaatatttctgtgaagggctttcaaaattaacaccagctttctggcaataattttgaaggtttaataatttaatcagagggcgaaaaggtaggttcttttcgcctttattttatgcaaaaaaaagaaccaaatcataatgattcggttctacagagattagattcaatttgtcaatgtcttaacttaatgacattggaattcagcctgacttctgttttttttagcgatgtttaattacgtgaataccataagcgattaagtaaattaccacttcgatcgttgcaataaagaaagttaccggccagttggtgataaagccgagatacagtccagcccacacgccaactaaagcgaaaaacacggaccaactgatcattgctggtattgttttaccaatatagcgcgccgttgaagatggcaatgttaatagaatgaagactagcaatgaaccaacaatctgggcaccgatagcaactgacatagccaaggctaccaagaaagcaataccaacccagccagtatgtacaccatgtgcaacggcaccgatatggtcaaatgagtcaaaattcaagcttcgagctaccaaaataattaatagtaaaactagaattgacaaaaccactagctgaatcacgccttgtttatcaacaccgatgatactaccaaacagaatattagtagcgtaacggctatttgatccagaaatggctaagaacagcacacctagcccaataaacagagctgagatcgcactaactgacgattctttttgatcgctgtgcaaggacaattctcctactccaattgaaccgagcaaggtaaatagtagcatcccccataacggtgcaatgccgataaagacggcaaaagctgctccagcaaagccgatttctgacagtgtgtgagctaaaaaagcataactccgtgctactacatatacaccgaccacgccacaggtaatcgcaatgaatgtactagctaagaaggcataacgcataaattcgtattgaaacattattcgaaatcctccttaaatttatccatctttccttgcctgatcgttcccttatttaaatatagataatcagtcatatactttttagctaaaggaatatcatgagtgacaaacaaaacggtaattttgtgttcacgattcaggtgcttgattaatcccatcaattcttccttagcagccggatctaggctagctgttgcttcatctaagatgatcatattgggatgatcaagtagagcctgcgctaaatatgcacgttgtttttgtccacctgatgcctcacccattcgggtattctgaatcttttctaaatgagtttcttctaactgatgatcaatctgttccttaacctttttggtcttaaacaatggggcgttaagtccaataaatgcgcgaatcgacaatggatactccgcatcaatatttctaaactggggtacataacctaacttaacgtctgaatcaaacttaaagttgcccgcagtcggctttaacatccccattaaaatcttaattaaggtggtcttccctgttccattaggtccaagtagtgcagtcattgacccgtcttcaagctgaaaactcaaatcttgaaaaacatctttagtatcaaatctcatcgagagatcatttacttctaaaatcactcttctaccccctccctaagttgctattatttttctattttagccaaattttgataattttctttcatccaagccaagtaagtagtgtggttaggaatagtctcccgcacatttaacactggaatattattttccttagctaattttacaaatgacttcacagttgaactgcttgcctgtgtattgttaacaaagaatgcaatcttttttgctttaatttcattattcatttgattaatcatcttaggactcggatcagtaccattctcaattgcttcttcaaagcccttatccccaatcttgtatcctgcttctcttaaagcataatcaaagacaggttcactaacaaagactggcttactatttttcttattagtcttcaccaattgcttaacttgattaatcttagctaaatacttgtcaccattagctttaaaataagctgcatgctttttatcaagcttagataaacgcttaactaggtaattaacatacttggttggcatacttagattgtaccaaatatgcggattatcccccttctttaatcccatcaagtcttcaccaactaagacaggctttttgctaacagaactagctagcttattcatccaagaatcatagcctaagccattagcaacaataatatttgccttggtcaattctttagcatctgccgtagttggttcaaaatcatgaggatcggtactgctattgctaatgattgccttagccgtaccatattttcctacaacatttttagcaatatctgcataaacattggtggtggtaatgatcgagactttacccgaattgctcgtcgaatttgatctattcgagcaagctgaaactaacagcgcaataacgccaattagtcccaaaaaagagattaacttcgtaattttagatttcgcattttgcataaaatatcctccttgtgcaaaataaaaaagcatttaagttagaaaattcagcataaattctaactaaaagttagaataatctagttaattacatatgtcaacatatttttgcatagacaaatagcaccagtctcccataagcctgatgctatcaataatttaagtcataaaattttgctgaattttattaaatgctttgttctaaaattacattattatataaacatatttttatataattgtcaaactaaattaaaattcttccttcacgtgctgacgcaaaacatctaagattttaatcacatgcttatcttctaagctataatagcgctcctgcctaacccgctcgctcttaactagcttagcctcttccaaaatacgcaagtgacgcgaaatagctggctgactaacatcaaactgcttaactaaattattaacactacttttttgattatcatttaaataatataggatttgaattcgaatcggatgattcaacgctctagtaatccgaataatttgctcgtccaatttcttcacccattcatactttttaatttattatagcttaaatttaggtataaaaaaacgctacccttcgggtagcgcaaaacataacagagtatcttgatttaagtagagatcatcaagatatttatattataatacgtttttgccaaaatgtattgttttttgattaataaccagaattatttaataataatattcgatattacttatagtattattcgtttgggtcttctttgacattcttcttccagaaactcatgattaaaccagcaacgattgaaccaataatagtagctaggaagtagaataagatgtggcttggaccaccgatgttaccagcaagtggtgatacccaaagaccaccgtgaggagctgggacaccaacgtgccataaaccaactaaagcaccaccaacagctgaaccaatgatacatgatggaattacacgacctgggtcagcagcagcaaatggaatagcaccttcagtaatgaatgagaagcctaatacccagttagaaacacccgcacgacgttcttctacagtgtacttgttcttgaagaatgtagtaccaattgcagtagcaaatggtggaaccataccacccaccattacagcagccatcaagatagcagcagtagctgagtgagggtcgttagcaaatgcacctgaagcgaagacataagcagccttgttgaaaggaccacccatatcgattgacatcattccggcaaggatagtggtcaaaagtaccaagttaacagtacccattccgttcaagaaatgagtaatagcaaagttaatgccactaaagattgggttaatgatgtagaacataattgctgcaataaagagcaatcctaaaattggatagaacagcattggcttcatgccttcaacagaacgaggtaatttagcaaatactttcttcaaaccaaccatcaagtaaccagcaataaaaccagcagcaataccgcctaagaagccggctggtgaagttgcgtgagcttgaacgttaacttggaattgaccgttaacaatagaggccatgtaaccaccaacaaaacctggcattaaggctggcaaatcaccgattgattcagcgatataggctgccaaaactggaaccatgaaggcaaatgccaagttaccagcattgtttaaaaagatgaaagcaggagtcttagcgccacccatgtagttttctacgatgaatgagatcgccattaagataccaccaccaataacgaatggaagcatgtgactaataccattcatcaagttcttgtagatacctgcccacaaacctggcttctcagttgatgaagattcagttgacttgtcttgagcacttgcacggtaaacatcagccttaccacccataatgtcatcaatcaattcgcctggcttgttaattccatcaacaacaggacggttaactaagtgcttgccgtcaaaacgtggcatatcaactttcttatcagaagcgataataacacctttagcacgcttgatttcatcaggagtcaacttatccttaaccccttctgaaccgttagtttcaattctaacttcgatgccgcgcttcttaccttccttaatcaaggcttcttgagccatgtaagtgtgggcaataccgttaatacatgcagtaacaccaacaatcaatggcttgttgtcgtcatcacttgtaccttgagccttagcagcttccttagccttcttagcttcagctgccttcttgtcttcttcgtcttttttagcttcagccttttcaaaaagatcgataacttcttcaggagtcttagtattcttcaaagcttcaactaaatcaggatcaattaacaaacctgaaagttttgctaatgcttgaaggtgagtattgtcagcaccatctggtgcagtaatcatgaagaataagtgaactggttgaccatcaagtgaattatagtcaattccttccttactcttggcgaataatacgcgtgccttgttaatagatttgttacgtgcgtgaggcatcgcaattccgccaccaataccagtagttgattcgttttcacgtgcccagattgacttaataaaagcatcttcgtcgttaacgatatcagttgctacttcaaggtcagccatttctttaatggcatcttctttgttcttagccttaagctccataatcatggagtcagggcttaaaatatccttgattctcatatttttcccctcgttttttattaagaaatttgctcaactttgatttgtggaagaacagcatcaatttggctcttaactgcaatgtccttagtaaaggcagtagcagcaccacaagccattccaattctgaagccttccttaggatcttgggtcttgtagtaagtaccaacgaagccggcaatcattgaatcacctgcaccaactgagttaacagcagtaccaacagcacccttagcatggtaaacatgatccttggtaagaaggaaaccaccttcaccagccatagaaaccatcacattttgagcacccttatctaaaagcttttgtgcgtattcaagcatcacatcacttgaatcaaaagttacgccaaacaagtctgctaattcatggtggttaggcttaattactagtggcttatatgccaaagtatcaagtaaagcttgtccagtagtatcaacaacaaattctgcacctgcttctttaatagtaggaagcaatgattgatagaaatcagttggaaggcttggagtaagagaaccgctcattactacaatgtcgcccttctttaaatcgtttaaacgatccttaaaagcagtgatttcttggtcggtaatgttaggaccagccgcgttaatttcagtttccttttcagcgtggatcttaacattcacacgagtgttatctgaaatagtaacgaaatcactttcaattctcttttgattcaattgacgaaccaattccttaccagtgaagccacctacgaagccccatgccgtattatcaacatttaattggttaaggatttgagaaacgttaattcccttaccccctgctaaaaatgaatcattgttagttctgttaacttctccgcggttaactttttctaattgaagaacatagtcaagcgctggattaacagttactgtataaatcatcctattttgcctcctctaattcaataccgactggtaatgaccgtttttgacctggttttagttgatcagttaccacaatcacgtcacttgtattggcaaacacagcaaagttacgctcaccgattttactattatcagttaatacataagcgtgtcttgcctgtttgatttcggctgccttaaccgcagcttcctctggatcaggtgtagttagattgccatttttttcaattccattagcaccaacgaagctagctgaaaaattcattgccttaatctgacttaaggcggtctgacctataacagcatgcgtatcgtccttaacttcaccgccaattagaattgtgttaattccgtgatttaaactgcataaagcagtctctacaccattagtaataatcttgacgttagcaacctctgctaaaaatggtaccatctcataagttgttgttcctgcatcaatgaagacattgtcacctggacgaacaaaattctgcacggcatatctagcaatagtgatttttgcgtcatgattcaaactgaagcgaacgttttgtgatacatcacgagaaaaatgtttaactgattgggcaccgccatgaacacgcttaaggatcccatttttttccatctgaattagatctcgacggatagttgattcagatgttgcggttaagtcacataattcacttacgcgacataactcgtgttgattaacatagtcttcgattaagctttggcgctcctgagtcagcatcatttctcacctcgataaatattgtattcgctttctcctccaaaatcaatcatttttcttcaaaaaatgtcatttttatttattatcgttcaataacattcatttatatgcaaaaaagatgccgttttttgattgaaacgacatcttttcttcgtcatttggaattattcttagtcgttttaccctatttgactaagaatccgtaaagatgactaagaaagagaaccaaagatctattaaccttgcaaaagcaaaacacgctgaatcattattgattcagcgcgttttactattaaatatattttgtctagcctctcaagctacgcttaaagttttgccatgggccgacatcatctgtttgcaaaatcaagtttggatagatttttctaatccagataaatgacgctactgtagcggctaaagcaattaaagcagagatagctgcctctaaattagttgcgttacccataattactctagctggcattacaaatgatgatagaaacgggatgtacgataatactttagcaaaaatcgtatccccacctgattgcatattgactgtgaacaagaacccgatcaacatcaatgtagatagtggtcccaccgctttgttggcattctcgcttttagcaaccaaagcgccacagaaagctgcaaagataataaacaataccaagccgattatcgtaaacaccaatccccaagaagccagattgccaattgcttgatcaatcatcggcttatactgtctaaataaatcgctaaagccatcgatgtatggggccgcgcaataaactgccacaaaaccaacaacataaattaacacttgggtgataatttcaccaaaaatacctaaaatcttcccagtgaaataatcgccacctggcatactcgaaaagattacttccattatcttggtacccttctccgtagcgatatcttgtgctgttacttgcgtataagtgatcacaagcatgtacaagataatcagcaaaacccagaaggaaatttgcttaacaggatcattatcaaagctcttcttatcaacatgcttaacttgttgcttaaattgcgctcgcgtagctaaagactgagtctgttttgtcgttagcttggccttacttaaattcaattgttgctgggcggtgtttaggctagttagcagctctgattttagatcactgtccattttttcatcactatagtaagttgcagctaattgattattcttttgttcaattaaaacatagccatcgatatcttcatctttatacgcctttttagccttagcttcagtgctatagttgtcaaagtcttctgactttttaattgcttgctttaaggcagaattagaagtaactaccccgacatagttgtcatcactgccgccagctgataccattccgataacaaatgaaaagaagacgagcagaaacggtgctaaaatcatcagcaaatatgaccaagttttcacttctctacggtaggtttcttttgcgacaagccagatcttattcatgacgcgcacctgctttcattttgaaaatctcgtctaaagttggaggttcctggtcaaaagtctggatatattgaccggccgaaagttggttaaaaatatccttaccatatttttcgtctgcaagaataagcagcttcattccattgttttgcaaaattatatcttttacacctggtaaggctgataattcagtagcacttttgtctgtcctgacaaaaattcgagttaggccaaagctgttcttaatttcatttactgggccattcaagacgatatgcccatcattgatcattacgacgtcatcgcacaattcttccacgttacgcatatcatgatcagaaaaaatgatcgtagcgccttttcttttttcttccaaaatcagctgcttcattagatcaacattaacaggatctagtccactgaatggttcatctaaaataatcaatttaggttgatgaattaaagttgcaatcatctgtactttttgttggttacctttagacaaagacttaatcttatccatggggatccctttaacagccaaacgtgataaccaatcaggcaattcttcttttacctttttagccggcatccctttaaggctagccaaaaacactacctgatctgaaatagttaacttaggcatcaaacttcgctcttcaggcagatagccaatattgtcataatctttagcgttgaaagaatgtccatcaatactaatctggccgtcataatcaacgaatttcaaaatactatgaaagatcgtcgacttacccgacccatttttaccaaccagtccaagaatacgcccatctgacacactgaagctaacatcaaacaaaacctgtgttgacccgaagcttttatttaggtgttctatttttaacataatttttcctcaactttttatctaatggttattagacctagaagtacaccgtcaaagaactgccataaagtatcggttgaaaaaattgtttttacaatatcaactgacccccaattggttactaaagtaatcactacaccagctgaagcaaccactactcctgtaccaataacttgaggggcaagtttcaacactttcttctgccatggaatctttgatgcgaccgttttattaaggactaagcttgcggacatgatgccaccaaacattagaccgaaagccaatccggctccaatcgacataataatttgaaaaggttgaggcgaaccagcagtcttaacatacatcatcacaagagctaatattggtccaacaagtgctccaattcccatgccttcaataattcgtttgttttcacgagcaaatttttcattattcattgttcttacctcaaggaaattttcagctaattaaacaaatccgaaaacttagtcggaatgttgttcttggcgaagtatttcttgaatgcatccccaaaactcaattgatctttttctctattttcaagcaaatcatgaacagctaagaatgctgtaacggcgtaattaacggctaaaatgattaacaaaccgagcacaatataaattaagtacagcattgttctttcctccaattcagcgattatctcccaggaaataatcttttatccttttaaattaatcatatccccatcatttatgtaaaaggtaaaaccgtccaattctgtcatttttcggactgattttgcattttattcttcatcttttttataaactaataaatcccctggttgacaatccaagacttcacagatcttgctcaacgtgtcgaagcgaacgccatgcgcctttcctgtcttcagaatcgacaggttagccggcgttataccaactttctctgccaactcctttgaagacatctttcgcttcaagagcataaaatctagtgtcacttcaatcatctatatcaacctttctaaataatcgagtctgcatcctcctgaaccttcattccgtacttgaataccaagtagactacgtatagtactgctaggaaaagcaaaccagttgtcacaccacttgggtatagtacattattcgaggatttagcgaaccaagtgcggtgagttatgaaaataatgtaatctattattgaaataagggtatatccagcaactgaaattaataatttcttgagtaaattcaaattactatcagcaaagtaaacttcttgcttgatattcttaacaattaatctggcatatcgacagattaaaaaggctgcaacgctcatcatgatcagtgatagcaacacaaccactattgcaccgatatagttatcaactgatacgccttttatacccctaccactttcaaagccagcacgaaaatccggattatgtataccaaataacacaacacctcccataacgatccacataattattcctatcacacaaaatatttggtaaatccaagcaaaaatcgtaagcaaattcaaaattaattttttcatttttctatcctctcaaaatatggatgattctgtatatagcactgccaattacacccgttactccaattactaataatgtaattctaagaacactccatgttccgcctaagttagcaaacactaagattgccatcattatcagcattccaataattgaacctatctgtcttttcttttctggaagcatatctatccctctcttccataaaactatctatctctttctcgtcttttataattattgtattacgataatttataattgcaatacagaaataaaatatttttttgggataataaaaaaataccaaattagtcgttaaactaacttggtattatgttttatcttccaagctactgctttttacttttcttcttatagtaagagttcatgaaaatattcataaagataacaaaggctacactttcaactatattccaaaatactgttccaaagcttaatgttttgtactgaaaatagtcccataccaatcctattaacagggccaaaataccagcgatgatacttctgtttctaacttggcgctcggttaaaattttatttttcataatttttaccccattattatcatatcgaaaaataggaaatctattaaccgaattttctattttttaatattatctatgtttatgttttttatgtctattttgtttggcgaaatctttaacagcgccttctacacatccttttatcataccacttccgctagggagcgcatcaatgaaacccgataaacatgatccacctacaccaagccagttagtgccaccacttactttttctaattctttataattcatttctttcatcataaaagttacctccttttttacaaatgtgatacacaagaaactgatccgctaataatacccacattagcaccaaatatagctccacctactgtaccaattggagtaccaaatgcagtgcctgcaatgccatattttagtccatccttcaacgctcccattccaatagctttagcacaatttgtgatttttctacggcgtcttgctttaccaccgttaccaccgaaaacagctgacagttcttcataagttaaagtttcaaatttgttcatgtttttcccctttataaaacttctaattacaattttcataagtgaattaagttttacctctcttcaacttacacactaataatacaaaacaatttaccttcattggcgtataataccgatttagcacgaaacaagatctatttggaaaatatttaccaaatcggccaagttttcgtatattagtaatttacaaaggattcttattaattgttacgctaacttgatattctgttttataaatccgaaaactagtaaaaacatagacacaatgcacttattatgagaatggctaacaaaaaaatcttctcatagccaaggctacaagaagattgccatcacattaatgcataaactgatacgcacgctctttactttaataaaacatgatcaattatacgactataacatagccactcaaaacccaaaacttgagtcgaaatcaaataatcatttttagcatagtaacctacgaaaaaaatcacaagtttcataggtttctttgcgttatcttctaagtattacgatattttctattggagatatttttagcctattcgcaccagtatttttttcaatacttatctactagttattatctacctctatgaaaagaactttggaaaaacttaggattttccaaataaacgtctcgtttatgattaccacctttcttactgtataaaggtagcatgtgttcagtatcagttagaccaatatcatctacagaacctgacccacctaaaattccgcttaaaagtacttcatctttagaaataatgattcgtttcatctacttttcctccttagttttctttcctaatgaaatgcccaaaactaaactgattaagatactaatcattccaattaattgaccccagatattatccttctcacctgtagatggtaaagactgagtagaaccatttttaatagtgtcattttccaatcgctttaacttagtaattctattttgattgttcttaacggcactataaggcttgctttgcacttttactgaatcaaattgtttattttctttcacacttccgtgtttttcactaactgctgctagaataatattctttttatgcgatttagctgttttcttgaccttagtggctacgattttaggttttactggcttcttcacagttttcttcttagtttcagctctaggagccgcatactcttgattacctgtcgtaactttagtcagatctgcagtagagctagcaacatttgcagcattctcaaatacgctattttcaacaaagtcagtaatagcaacgtcattgctagactgtgtttgatcatcttcagctacagtcacttcaggtatttcattactttcagattcagtagtattatcatccttcggttgatccttaattactgcctgttccactaatttattagctgcatcagaatacaaaaagttatataactcttgtcccgtcttttctccaccgacccatgcactaataatttttccattaataaatctcattgtagttggagtacctggaataccaatttctttgaaggcatactcatgtgctccttcttcagcatcaatattgaaataaagcagcttacctttaacgatttcattgaaatcttttaaatcaggtgaaaattgtcgacagtagtaacatgttggacgaccgatatacataagatgttcttgattatttttctctgctagaagatcttttacttcttgcatttttactctatgaaaatcttttacattgttctcataatcttcaacagatacctcatcttcatcatcttcactatcttcctcatttgcattattaggatcttgattattagtattctgtgactgattattttgatcttcagaagctgctggctcttcttcctgcttattttgagtttgagctgcttcgttcttactactagttttctgctcagattcggaaacatttttatcatcattttctgttttagatactacttcacttttattctcttgagaagtattaccttcatccgcatgcacaatagtactattcatcatcaataatactgctgggctcaacattaacattaatatttttttcttattcatagatcttcctccgtattttttataactaagaaaaatatatcaattatcagctatctttttggttatcagacttattcagtacactttttgaccaaatcagttatcaaaataattggaatttgattctaactaaaaaagagcttttcagctccttttaattttggttaagaattttatccttaaaatattcaaaatatgtactcttacctgtaataatagttgcgttgccttccatcccatatttcaaatttttcttggacttggccttacagattacttcatagacattatttccgcgtagattaatgggatatactccaatttctttcacttttcctactaatctatccattgttccactagcattagctacctgaaaatacagtgtttggcctttttttattgccccaattttattacctgggaaataagtaactacattgaccgttcttttagccttaatcatcggaaacaagtgaactgtattctcctgtttatcatcaagatgaactagccatttttctctatttcttctaacaatttgtccttcatgatagtttctattggcaatattaagtgtattttgtggttctacaattccggtagatgtaactgtactttgtctagttgcaaagaaagaaccgactattaagatcagaactaaaattgccataggaataataatcatagttgaaaaattcttgaatttataggaatagtattcggtactctcatagtctttattattcataacgttgctcctaattctcaactaagttatagtaaaagccatgtttctgcattaatttctcatgacttccttgctcaacaatttgaccatgatctacaaccagaatattgttagtcctttgtgcaattgctaaacgatgagcaataaaaataatagttttatcttttaatttcattaaattatctactacttttttctctgtaatcgtatcaagcccgctagtggcttcatcaaaaattaaaattttagccggtgacaataatgcacgtgcaatagttagcctttgcttttgcccaccggataaaatcttggcattttcatccatcttggtttcaaactgcagtggtaattgttcgatttcagactcaatttctgctatctgacaggctttcaatatatctttttctgtaatatctggtcgactacctaagagcagattttctttgattgttcctgagaagatgtatggtgtttggggaacatagtttacgtatgaccgtaagacatgcttatctactttagtagaattaaatccattaaaagttaacttgcctttgcttggagagaagaaatcaactaaaagtttgaccatagtagacttacctgagccactcatccctacgattgccaacttatcattgggttcgatttttaaattaatatcttttaatacatcgactccatagccataatgatagtcaacatgatgatattcaatctcacctgctaattgcttggcatccctaatctgagcatctttctggaactcactcttaaccatgtatacttcattcaatcgattttgtgctacattagctgattgtagagttggttgaagattaataatgctctgaagtggatctacaaaatacgatagtaatgcgttgaaggtcattaattgaccaatgctcatctgcccgttcattacaaccttagcccctacccagaggataattacattgagagataactgaatgaaggtctttaaagctgactgcaaagattcagttttactgtaacgaaaagatttcttgaggtaatcgacgaattgactatcaatcttacgataacgtgtttgttcgctatttaaagctttgattgtttcaattccttgaatatcttcaattactgaagaacttaagacagcattactctccatctgatcattattcatcttttcaaatttcttagaaaagctaagaatcaccactgcataaattggcaaagacagtagagtaatcacaaatagagtggaattttgaattgccaaaactattcccatcacaattacaattgaaagatcaagaaataatgaaataactgtactggcgagtgcgtcaataattcgactagcatcagagaaccttgaggtaatttcccctgttctacgagttacgaagaattccattggtaattcaaaaatatggcgaatgtattgtaagttaagatcaatacttaatcgctgacctagaacatccaatagaaaattttgcccgtaagaaaagatagagttgaaaacatatgctatcaataaaccaatagctaggatcgacaaagtttggtatgtaccgctaggaatataagtatcaattaagccttgcaagaagtatgagctacaaatactaatgattgtcatcaaaagagcagccaaaataatattagtgactagtttcttttgtttgaacatgtatggaaatagtgaccacagattttgctttttctctttgagtggctcaaaatcatcatttgggaccataaaaagggcaattcccgtccattcttgagaaaacttttctttagacattttcgttaaaccaacgctaggatccggatcagcaatcactaaataatttttggttgccttaatcacaacataatagtggagtaattcgccttgctttaagacgtgtacgatgaaaggatattgaatgtctgcatcaggatcaaacaaggacatgtcagctttaactgcttcagtttttagattaaatgcttgtgctgttttaactaagcccagagcggtagtcccttctaaattagtgcgggctgaatgacgtaaatgggctaaaaatactctagaatgatattttttaagaatcatagctaagcatgcaactccacaatctgattcgtctacttgtggtacataaattgatttatactgtagtaacatcttttccactcctcatattaagttgaatccattatttcatgattggaaaactaaatgtaaaaaaataccaaatcggttattctcattaccgattcggtattttagttttctaactagattgagctactcaactttaatattttcaaatttatctacaagctttttaaccacggctttatacgatctagaataagttaccatctgaccattatcaaatataataatgcgttccttcgtgtcaattgcactaatgttcttaggatttaccaaagaagattgcgaaacttttgccaagaatgggttttctttatcaatctgagtaatatttgccttatactcaacttctccattctcagtaaccatatgtactttatgctgtgtagtactgtgttcaatgaaaagtatatcgccttcggccactttacatacgcgccgaccaatcttataagtaaagtcacgttgactaaacttaattctgttagataaattatcgaaggcgttacgtaacgtttcttcgatacgttgaataatcttatcagacgacatagacttactaatataatcaattgcaccgatacgacggcgatacgttaatggagcgtacttatcgtacgccgttacgaagatgatctgggcattttcgtcattcttcttgatgaattcagctaaatctacgccattcttagctttagactctcgacttaattcaatatctaagaagtagataccattcttaatatcatttgtgactatgtatcctaccgcttgagcaaaatcgttagcaacaaacgtaacagattcatttaattcagcgtaaccttcattatcatctattaagtcttgaatagatgcattgatattcttagccatctgattagctaaatctttatcgtcatcgcatacaatgattgggaacttactcatcctcttcaccatcttccgtatcaattgtcatataaaagtcgaaccagccgtcttgaattgtataagaaatagacatatcaggatatttactctcaatttccttaatattagctaatccaagccctttatggtctttcttagtagtaaagccacgttgttgaatttgactagttgagatatttttattttggattttatttctgatttcgaactcaaattcatctgggtcatcagaatagaccattatttggacttcagcacttcgaatatcatgcttttcggcaatcaatgctttactttcctcaattgcattatcgaaagtaatgccaataatacgtactagatcgagttcatctacatggtctggtaaattacggatattatttcgacattcaaaattatatggtatatccaaattatacaattctgttatctttggaataataatgctcttaattgatttaacgtaaatgtgatttaggtctttatatttaagtaaggctttagaatttaggttagtttcagtatatttatctagtttctgaattacttcttgaacgttaccttcttgcgcacttacctttaaagaattaagaatatttttgtaatcatgtctgaaggcgcgaagatcatcttcacttttttcaagataagaagcatattcttcaagctgatgctgctgttgctttaatttttcttgatcctttttatttaaaagtttttcttgtaccatcgtcatttcatgatatataaatatagcaaaaatagtttggataagaatatagagagaaaagaacaaagttaatggtgtaaaagatttgctttgaatatatatgatagagatgctcaccgtagaaacataggtataagctaatatgcctacgaaaattttattattttggtttgctagataattatatatttttccattacctagttttattgcaactatcatcattagtattagtaagaaacgtagtgataattggcctatcaaagtaaatgacataacctgagtgatcatatcagacacaatatcaactaataaatctaatgtgcatactaatattattgaaccaaatagtatttctaatgtattattttttctcaaatataatacaaaaagcaaagtttcaagtatatttgtgaagattacgccaatattacctatagacaataacaaccctaaaaaaatattagcaatacacaaaaatagaatctgtctctttttagatcttactcttgatattttaaaaaaacaccatacatctgctaaactagaaaaaacattaagaaaaagaaataagactatcttttccatatattattccaaagttttttactcaagaaattaaaaccaacatgtgccgtgcttccaccaacaaccttagtcaattcttcttccttcaaaacagtctttttaacattttgcttcttcatgatatttcatcctttcatgattttatactcaacttgtttacacctttaatatatcatgtacttttaagtaaattaaaaaagataccaattcagtcatactttcgtaccgatccggtttcatatttcttcaaacgtaaacaactgacaattaattttcttagctaattcctgacagctatccgtaaagccagatttggaaaatagataataatgcttaagtggatacttgaagatttcactatttgtaatcaatttttctaacacactacgagagatcggttcattcttccatttacattcgccgaaatatccatcacgttcatcgtcagagaatcctacaatatctaactcaacttgttgatgtgttctcttatcggttccccaccaattgcccaagtggataaacggattaggaacaattttttcattcatatcctgagaccacatgaagtcttgactgtatttttcaaactcaggtcccatgaaatcagatagacccttttgtacttttacccaagcaagatcagttaagccacgctcaattagatcggtttgcttgccaacaaaggtataccagaagcggaacatcccgtcacagatacgataaacgatatttttgcttttactcttcttttgctcagtaaccggtaactttttctcaacaatacctaaatctatcaaattattcaggtacgtggttagcggaccagtttgtaagtgggcggattgcgcaattttactatgcttagaagcacctgaagctatcgcattgataatcgaattatagttagttggatcgcgtaattcctgttgtaacaagttattaggctcatcaaataagcgacctgatttactcaaaaagtttttcttaatattatccgcaactgacatgctgtctgacatataactcaaatattggggtacaccgccacaaaccgtattgatgataaaagcgtcctctttactgagttttggtaacatttcatgtgcttctgataatttaaatggttcaagctttaaggctaaagtgcgacgaccatatagtggactttggtagcctaagacttgtcgttccataaatgacatcgatgaaccacataaaatcaaaaataggttagtttctttgaattcatgatcaatgtaggattgcaacattgaactaattgtagggtaagccttagccaaataaggaaattcgtcaataactaaaattacacgttgtttttgagctaggtgtgtaatttctttaaagcattcctcaaaatttgcaaatttttcttttccaccctgatctgtatttttaaaaatactaattgcatcagaaaaacgttttagattatcttccgcattttcttcaagtgctacataataaattgactttttatcttttaaaaactcattgatcagtgaagtctttccaattcttcttcgaccatagatcactgtaaattgaaaatcattttcttgatacgcctgattcaattgctctaattcttgatgtctacctacaaacatagcgcactccttttcactacatcgtaatatactacattatattatactataacacgatatagtataacgtaatgtacgtgtattctatttttgtaataaaaatggccgttacttagagaaatagcgaagatcattaaattttaacatgctataataacaatagaacaagaataaaaagttttagcgtgcgcgttgaggtagctcctcaacttagtcattaacgtgtggctctgctttggcaaagcttttttgttatgttaataccctacaaaaaagaccgtgcatccctgcacggtcttttcatcttatcacatctattttctaacgtattcgccgttcttgtacttaaattcaatcttcttgttaggcaattgaaccgtaattctgcgatatacaggaccgaagccgtgcttttcaagcttaactttcacgctaccgtccttgtttaccttaaccttgtacaagttgtattcgcccttttggtacttaaagtcagttccgttatcttgatagtgaacgtacttaccctttttaccaaatagtctaaaggtcatactctcgtctggttcaccagagatgtggctaacttctttaccccatggcaagatagtgttcttcttgataaacagtggcaacttgccaattggtgcatcaaccaaaatcgtggtctttccagcatgttcaacaccattccagaaatcaatccattttccttttggcaaatatacggcacgcttggtttgaccttcttgaacaactggggctgccaaaatgtcctcgcctaccatatattcatcattcaagttatacacctgtggatcattttcataattaaggacaagtggacgcataattggcaaacctgtcttagtttcacgatagaattcatcgtaaagatatggaatgaaacggtaacgcagcttcaagtacttacggtaaattgacaaggttggttcgccaaatatccatggttcttgtgagcgagttcctagagccgcatggtttctgtacaatggactaaacaatgcgccttcgatccaacgagtcaacaattcaggtgttgtgtcagcaccaaagccaccgatatcagtaccggcaaagctgaatccactcatacctaagttacataattgtggaatcatcatttggacatgtgtccataaactttggttgtcaccagtccaaactgtggaaaacttttgcgttcctgcatatgctgcacgcgtaatgacaaatgggcgttttccactgaatttcttcaaaccttcataagttgccttagccatgttatgaccatagacattgtgcatcttcttatgagttgaagcttcttcttcattatggaagacgatattttgtggaatttcacccttgaaggatgcaggttcattcatatcgtcccagatacctgaaacaccaaggtcaactaagtacttgcagttcttagcccaccacttacgtacttctttgcggccaaagtctgggaagactgaatcgccaggccaaacttggtttacataaacagtgccatctggagcctttacgaagtagcccttttcgataccttccttgtagatcttatagtcatcatctttcttaacgccagggtcaataatcgtgattattctgaagcccaatttacgcatcttagctacgaatttctctggtgactcatagttatcttttctccaggtaaatactctgtagccgcgcatataatcgatatccaggtgtaaaacgtcacatggtaagtcatacttacgcaagttttcagcaatcttctcaacttgcttttgactgacactgtagccccaacgtgattgttgatagcccaaagtccacttttgtggcattggtacacgaccagttaaataagtgtagttagtaataacttccttgagtgagtcaccaccgatgatgtagtagtcaatattgccatcaaccgctgagtagtagtaatagtcattactttccttacctaagtcgatgtggttgcgataagtattgtcaaaaaagataccgtaaggatgaccattttttaatcctaataaaattggaatcgacttatacaaacgggtaaagctctctacttgcggatcaggattgtcagtattccaattatcataagcatagtggcgtttgttcaaatagccggttttatcacccaagccataaaattcttcgtcatctgctagtgacttgaccacttcataataatcggcgtcatgctttcccagtaatttatccacatcatggccttcagattcagccagcttcaaatgttcctcatccatctgtcggtcaattggggttcttttcccccgataatctacgaccaatggattgccttgttcatcaaagacgtcaattttttcatcatcataagcttttactatcaacttagccgtagctatttcaatatgatcgcctttatttttaactgtaaaatcagttttaatttctttatcgccttcgatagcataagaattgctagcattacctcgatcttgaaagaatcgcataatttccggtgttaacacggtcaaaatcattggtccattctcatagtttaaggtaattttttgtccatctttagtaaaatcagtaagttgattaatcataatttacctctaaaaaatcaaaagttatgtattcgctttcaattttaacacaataagctaatcaattgggtcataccagaaaaaacaccttcagaaatttttgtatttaaatacaaaaaaactgccttacggcagttttatttaatttattccatcggaaaaatcttatctggattcaaaacataatttggatcaaaaacatgcttgatctttctcaaaagttcagtgtaatcatgaccatagaaatcctcaaaccaatctttgcaggcataaccaataccatgctcgccagacatatttccatccaaagctttagctgtcttataaagttcggtaatcacataatgactcttttgctcaaactcttcgtcactcattgcatctgagcaaagataaatatgtaaattaccatcgccggcatgaccaaagttaggaattcgcataccaacctcttgttccaattcatcaactctatgcaaaacatcaggaatatgattaattggcacacaaatatcaacttcatccatctttggcgtagacttttgaatagccaaaagcaatgcttcccgacaagtccaaatcttctttgcttcctctgaattagcatctaaaattaccgcatcagctgctttaaacttcttcgttgctgcaagggcaagctttaattccgcatccaattcctctttagttaaagaatcaagccctagaataatgaagccatcgccatttgcaatcgggaatttttcatcgtaatacttttcccagagactaatgacttttctacccataaattcaacggttgttggcactacaccagaagccaaaattgctggtactgatttaattgctttatccaaattaggaaacggaataattgcattgatcgattgtttaggacgtggatataaacgcatggtaacttcagttactacacctaaagtcccttctgagccaatgatcaggtcttttaacgaataacctgatgaggacttaactgccttagcgccaaatttgtaaagtttaccatcagttaaaacaaccttcaattcgcggatatgttctcgagtaacgccatatttaattgctttcaacccaccggcgttagtatccacattaccaccaattgtagcccaatgcattgctggagctggcatataagtaaatggtttattggctaaatattcttcaatatctttcaaccgaatacctgcttgcacagtcatcgttagactttctggctcgtattccaaaaccttattcattttcaccatatccagtgaaatgccaccttcaacggttaaattgccacccattagaccagtcgaattaccacgcggaacgataggaatatgatgatcgcttgcatatttaacaacgttttcgacttcttcattagtttcaggttgaattaccaagtaaggcattgctctaaccgtcttaaattggtcatgatcccaatgaacagttggcttagtaatgaatcgctctggatctgagataaatttactcaaattatctatatctgttgcagttaattttttaaagtccatctttgacacttctttccaaattgaaacatcctatattaactaatgtatccgcttttgtaagcggtgtcaaaaacaagaactgaagatttttttatctaaaaaagcaaatttccatactacctcactttaaaatgcgatagtatcgactttcatttaaataactattacacaaaatatgaaaataaaaaaactgccttacgacagtttctagttaaataaatccgacatcttagttggaatattattgtttttcacaaaatactttttaaaagtaggtaaatctgcattttcttttttcacatacatatcatgtaaagcccaaaatgcagtgattaacaaattaacgcccaagacaattaacataccgattaaaatatatactaagtaaagcattgatctatcccccgctatatcgtcacttgacccagagtcgcatcttcaatgaagtatctgacgaaagcttgattgaagctcatgccctggccgttgtaaacatgccactcttcgcgtttggcacctacagttctaatgattgaaattactgtgcaaattaccaaatatgcgattagcacgttaaaaattattttcattaccagcatgtctacacttcctctctgtactactcaactaatacactaatatttattagtcaatttgtcaacatcttttagtatttacttttttctccccaggtataaaaagccatagatagctggtccgatcactaccgccccagctatagaaactataatcactgcaataaagcgaggcatagcaaaaaattccgagctaaatttcatacaggcccaggccccaaagaaaaaaatcgcccagccaattaaaattgaaattagcatatttaaacctgaaaatttaggtttagagtttttattgttcatcaagttttctctttcataaaaatattgtgccacaaattgaaggtcaataaacaaaagtgacagattcggtcgttttttagacttatttggtaaaaaataagggagattaagtaaaatatggcgcttaatctcccttttgaatcaataattatttgcccataagacctgaaaaagccattcctaaggcagcaccaccacatgcacctgctttagctgatacgggacgagcataactagtaattgcataatgaaacttcatcacatcatgtgacaatttaccctgccagcttaatggatcaagaccaactcgaattaagttgcagacataattagctgattcaccattttctaactcatgctttgcatcaagtaggatttttctttcttctggcttagtatcttcatttactagtaggtcagtaatattacttaatagccattgttttaaatcatctttattttcttgatacatttttatccctctttttcgactttttcattaatatcaggatgcatccctacaaccattttagaatctttcatgttcttcatcgattcatttattttaataaaaaactctgcaagtagcagagctttttacctcattgcagagttacttatacatatacttagcacatgcttttttagaatccataccattacgaatcttcaaagctaattcaatcgatacatccgcaataattgattgtgggtcaatcacattgtaaggatgatctggtgccttttcctgagctaacgacaattctgtacatcccagcaagattacgttgcagccataatcatcatgcattttttgcaagatctggtggtacaatttaccatcaaccattcccttttctttaatatcggaataaatgagcttattaaccatcggttgaatttccggaccacctaattctgcctcacggtgaaccgcatgaatttcatccacatacaaatgatcatagattgacccttcagtcgcaatcaagccaattttcttttcttgtgggtatttttcaataaattgatgcactgctattctcatcatgtgtaaaaatggaatatcagtcaatgcagccaaatcatcataaaaatagtgagcggtattgcatggcatcacatagaagtctggtcccaatttggcttggcccagaacatcgtcacgtaaatcatagaaaaagtttggtttagtatgatctttaatataagccgttctatcaggaatttgtgcatcattaaccaaaatataatttaaataatcttggtccttagctatttttacacggtgattaattaaacgaacgtagctttctgtggcaatagttcccatgccgccaataatactaaagaagtgtttcactattttcacttactttctaaagtgttcttcttgaccttccaactcattaattacctgctgtgcaaccacaatatcagatggatatggggtatttactccgcgaattttttggaaagcgtcagcccccttaccacagattagcacaacatcatctggcgtagccatggcaatcgcatcatgaatggccttcttacgatctaactcaatagtaacgtcgcacttagagtgatctattcctgaatcaatttcttcggcaatactctttggatcttcaaagcctggatcgtctgtagttaaaaatgctttatctgcgtatgcagtcaaactttcactaaaaccgggacgacgtgacacgcctttatcaccaggagctccaacaacaacaataatcttaggatcgttgaattcgttacgcataaatctcattaaagccatcattgaggccttattatgagcgtagtcaactacaaccatgccgtgcttctttgttctctcggtttgcatccggcctggaatagtaacatcgcgaatacccttcgcacattgatcatggttaagtccagccaagcctgctccaataattgcggcagtaccatttgactcgttgaaatcacccagcatctttaaagtataatcaccattaattggcaatttacgtgccttatcactagcacaaactaaattgaaccgagtttctttcatatctaattgttcagaagagaatctgaaatcaattggctgcttcaagtctggattttcaaaattatcgcgggcaaacaaataaatactatcggggttggtagtagttgttgcggcagcgtagacttcatcaaagtgtgcagtttcagcgttgataatacatttacgtgagttaacaagcaattgtaatttgcagtgcaaataatctgcaaaattagggtgttcgttaggaccaatatggtctggactaatattcaggaaaaagcctaaatcataagttaaaccgaagacacgatttttcttatatgcttgactagaaacttccattaccaagtgagtcatgccattatcaacagccgttctcatgtctcggaataagtccaaactctctggtgtggtcaagcttgacttaaagctatcttcaggcttaggaccgaccacatcattaactgaagaaatcagagctgtcttaccaccattcgcttgatcaagcatccccttcaaaaagtatgctgatgtagtctttccctttgtaccagtgaaagctacaacaaacaagtcatcttgtggaaaacggaagaaagcagctgacaaaagagccattgccttagaaacatcgcgcacaattaaagcgtgcattccttttccttctggatatggttgttcagctacataacaaatggccccattgtctttagccattgacaaataagttggtctaaagcctgctcccttgcagaagaacaatgtattagtttgaatatcgcgtgagtcataagacacatagtccattttagtagctactgtatcttgcactgcgcttgacttgagcaagtgatgctcttttaagatcaatatacaggtatttaaggaaatactcattaacttttctcctcgttgtatttaaaacatttcagtcaaaattataacacagctagtgtgttggtgacgctttcttcggatcaagtggcaaacgaataataaaactagtccacttttcgtttgattcacagcgaattgtaccatggtgtaaatcaaccacacctttggtgatagataatcccagaccagttccgcctgtcttagtatttcgcgaagtttctacccggtaaaaacgctcaaagattttatttaatgatttcttcggaattggtgccccattattttcaacgcgcaactctacttcacgtttgttgactaaattggctaccaatttaattttagttgcccctgtaccatacttgaaagcattagaaatcaaattattgtaaacgcggaccagcttttccgcatcagccttaatcgttagattctttggccgcgcttcaatctctatttcaatgccatttttttctgcttctaattcaaagccggccgctacctgctccaacattgaataaatatgcaaatcattcagatttaacttagtattggtcgactttaaagtagtatattcaaacagatcgttagccagtgctttcatttgttctgccttagtataggcaatattgacatactttttctgatcttctggcgaagtcactcctgcttttaacaaaccaagataaccaataattgatgttagcggcgttctgatatcgtgcgaaacattagtgatcaattcatccttagattgctcaattgcccgttcttcattaatcgaatttacagtactatcaaccaacgaattaatcgaatccactactcgttgcaattctggtcgtacccgaaaattaatccgatgatcaaaatgaccattagcaatatagtgaagttccaaaataatgtgacgtagctgcatttggtgatagcgtcgaatcaagcgccagtacaaaacaaccaagtcgcccactcccattaagacgatgaatacgttttgccaggaccagagatgatagccacctgcaaaagtgatcgtcttttttagaaagtagattccgttgaccaggctttcatcctgcaaaatagctaagtgaatcagaatgataattgataaatttaataaaaacagaaggacgaccgttacgaccccttctgcaaacaattcgctcttttcggcgccagttagcttgacgcgttcttttttcatcttatgcctcgaccttgtaacctacgccccaaacagtttggatgacatcctcaccatcagtggctttttgaattttatcacgaaggtgtgacacgtgtaccatgacagttttagctgaaacaattgattcttgttgccaaacacgttcaaagatttcatcagctgaaaaaacacggttagggtgactagcaagtaagtataagataccgaattctaaggcagttaattggatagtcttaccatcaatagtcttaacttcatgtgaatcacggttaattaccaatggtcctacttccaaaatatctggtttttcattcttaacttgcttttgacttcttctcaaaagtgaacgtacacgagccattacttcaagtggattgaatggcttagaaacatagtcatcagcaccagtgattaagccttgaatcttgtccatatcaccggttttagcagaaacaataataattggaatatcggagtcttttctaacttccttaattacatcgattcctgacatatttggcatcatcacatccaaaatcatcaaaacgatatctggcgtagtggtcaatttagtaattgcttccttaccactatatgccgcaacaggttcatatccttcatttttaaggtagatacttaatagttctacgatttctttgtcatcatcaacaactaaaattttcacgaggaatgttcccccttcttgtttattattctctgtttttctatctacagtttagcagatatcatatagaatattttacacattttagaaaaatatactgctttcattatcctttttaaacaaaagctaaaaaaatacacgtttctccatcatgaaaaacgtgtattcattctatttactttaccttatcatcatgcaatttagtttcgacataaacgcagacgataaataacagctgccttgtttaacgcttattgaatttccttcttgccagtgtagagttcatagtagtaacccttttgcttgattaattcatcatggttaccatgttcaataatatgaccatgatcaagtaccaagattaaatctgagttaacaatcgttgacagacggtgagcaataacaaaactagttctaccagtaagcaagttgtccatcccggcttgaaccattttttcagttcgagtatcaatacttgaggtagcttcatcaagaatcattactggctcatcagcaatcattgcccgcgcaattgacaacagctgtatttgcccttgtgaaaggtcgccgccatcaccatcaatcacagtttcataaccgtgatcaaggtcatggataaattcatctgcgtgtgataacttggctgcttgataaacatcgtcatcactggcatctggattaccaaagcggatattgtccataattgtgccagtaaagagatgggtttcctgtaaaacaattgaaagtgattttctcaaatcatcttttttaatgtttttaattggaataccgtcataagtaatcgttcctgaatcaatatcgtagaaacggttaagcatgttagagatggttgtcttacctgcaccggtttcaccaactaaagctaccttcattcccggtttggcattaatggaaatgtcatgcaagatttgatgatctggtacgtagctaaagttaacatgatcaaaaataatatgaccacgaacttgaaccttcttggttgagccatctttttgtggtacattccagtaccacttactgccgacttcatcgtttttcttagaaagagtaactgtaccttggtcagcttctgacttttgatcttccaagttgaaaattctttctgcaccagctaaagccattacaatagagtttaattgttgcgaaatttgggcaattggcatactgaattgcttagataactgtaagaatgaaccaatggcaccaagtgaaagcggagcccaactattaattgcagcagcaccaacaacaaaggcgatcaaaacgtaaagcaagttacccatgttacccataattgggaataaaattgtagcgtaagtgttagccttacctgaggcttgacgcaactcatcattatatttgtcaaagccttccttagattgtggctcatggctgaagaccttgatgaccttcaaaccattaagcatttcttcattataaccattgatttggcccagcttcttttgttggacttggaagaagtgacttgatctaaccgttaagtagcgcacaattccaaatgataaagcaaaaataatgaaggagaacacagtcaattgccaactaagtgaaaacatagcaactactacaaataataaactcaaagctgagttagtaaattgtggaattgactgtgaaatcatctgcatcaaggtatcaatatcgttagtataacgcgacatgatatcaccaaattcattttggtcaaagtatgaaattggcaagctttccatgtgaacaaacatttcgttacgtacacgatattgcactttttgagctaaaacacccatcagcatgttaaaaaggtaattagacaaaaaaccaatcgcatagatcccaaacattaccgcaattgcagtagctagagggccatagttaggaactttttctttagttaaaggcacaatataattattgatcaaacgttcaatgaataacgagccaataacgttgctggcagctgctagcacaatagtgatcatggaaacgatgagcatccatggacttgtactattaaccagtttcaataggcgcaataagattttggttctgctaccctttgtttgatttttacttttttccattgcttgatccaaattgctcacctactttccttgttcttcctggaatttagcgattgaactataaagttcgttagtcttcatcaattcatcgtgggttccgatagcttgaatttgaccatgatccatgacgataatccgatcagcatccttaattgaaacaattctttgtgaaataatgattttagtagtttctggcatatctttagccaaagacgttctaatttgtcgctcagtactggtatcaacagctgaagtggagtcatctaagatcaagatcttcggattcttaagcaaggctctggcaatagtaattctttgcttttgcccaccagaaacgttgttaccaccttgttccaccattgtgtcataaccatctggcatttcacgaataaagccatcagcatgggcgattttagcagcggcaattacttgttcatcggttgcattttcgttaccccacttgaggttatccttaatcgttcctgtgaacagcacattcttttgtaaaaccatcgcaacgttatcacgcaaggtcttcaagtcatatgacttaacgttgtgtcctgcaacccgaacggcaccagaagtaacatcataaagacgcggaatcattgaaaccaaggttgacttcgatgaacctgtttcaccaataatcccgattgtttcacctggcctaatgtgcaaattgatatcttttaaagcatcagccttgtccgcaggttcgtacttaaagctaacgtgatcaaagataatttcaccattggtcaaacgtttcaatggcttcttaggatcttcaattgttggttcttccgtaatcactgaccactggcacctgagataaccaattgcgtagtaatcatagctaaaatgtttaaactaaacaaaactgagtttgaataagtaaacattgaaattaattgaccagtttgtaaactaccgccaaccacttcttttgcaccgaaccagcagattgacagcgttgaaatattcaaaacagctgcaactactaatgcgttcaaagacataatcttttgtgcagtcgcaaacaacttgtaaataaagcctgatgacttcttgaattctttaatctgcggttgttcttggacataggtcttaacttcacgaataccacgtacgttttcacgcacaacctggttcattcggtcataccctctaaaaatcttaggaaagtatggataagctgttttaataatcaaacccaaagcaattgcaaaaaccggtcctaaaactgcaaagattaatgataaacgcggactaataataattgacataataattaaaacgatgaacatcattggtgctctaacagcaattctgatgatcatttgatatgccatttgcacgttgttaacgtcagtagtcaaacgtgtaactaaactggcacttgaaaagtgatcaatattttcaaaagaatagtcctgcatatggtagaacatgtcttggcgcaagtttgcggcaaaaccagcagctgcatgagctgagacataactcgcactagcgcctaaaattagcgaaataacggttaacactaatagcaatagccccattttactaatataggacatatcccccttcataattccgttatcaatcaaaattccgaccaaatatggaatcagcatttcaatgataacttcaccaataacaaacattggtgagagcaaagacaattttttatattgcctaattgatttgctcaatgttttgatcatagagacccacccttctattcttttattcaatctcgcaaataaaaagataaatggatcatctccatttatcttttttatctatattaagtttaagtatgtgcttatttttacggaaattcaattaacatgcttgcaaaacaggtaaattatttatgttgttgtggccttggtgcaaatgcggaaccaacaatattgtagtgctttctgaataaataacgtacaccataggcagccgccgcgataacgatgtcagctactgctggtaaaactgggttgattacgcgcaatgctgggatttgcaaaatccacatccagacaaacaaaacaactgctatagccaacattcttaagatcagcttaaccaatgaaggacgtttaccttgctgaggcattagccaatcattgtatttaaccatgaagatccccattaaaatacctacactggcaattgtcagaatccccatttgtgaattatacggttggttcttagtttggaataatgcaaggataccacataaaccaacaaaaattgctaaataaagcaatgcgccatcaaccatcaactgccaagttggtgtagccactggctttttcttaggatgaagcatttgttcagccttaattgctggtgaagccaggtaaagcccattggctggttgcccatgacgttgggcaataataatttcactgagcaagccattagtcatcgcaactgcatcagcacgtgacattgaaccttgtttttgcagttctttttctagacgaaaaacatagtcactgttcttgttactcaacttttcacgcaaagcttttggatcttcctgcttaattttttcatcctgagtatcaagctcagcttgcttctttaatttagcttgtttttcagtgttaatttttgtttgatcttgttctctctttgtctcttcagccattcttactcctagacgttaaatctaaattcaataatgtcaccgtcttgaacctcgtaatctttaccttcaagacgcagcttaccagcttctttaaccttttgcatagtttcaagcttgtctaaatcatcaaatgaaacaacttcagctcgaataaaaccacgctcaaagtctgagtgaataacaccagcaacttgtggagctttcatccctttgtggaaagtccaggcacgggtttcaggaccaccggcagtaaagaaagttctaaggcctaagatatgatatgcagcacgaatcaaacgatccaagcctgattcttctacgccttccatctcaaggaattctttcttttcatcatcagccataccagcgatttcttcttcagttgcagcagaaatacctaagcattctgcaccttcgctttcggcatgcttcttaacgatttggtaatacttgtcgctttctggatcagccattgaatcttcagcgatgttagcaacgtagataactggcttggaagttaacaagaacaagcccttaacaatcttttgttcatcttcattaaagtcaattgaacgggcagcattaccttcttcaagtactggctgcaatttattcaaaacagccatttcagccttggcttccttatcgccttgttgagcaaccttctttaccttattgattctgcggttaacagcatcgaggtccgcaatagcaagttccaagttaatagtattaatatcttcttctggatcaaccttaccagtaactgaggtaatattgtcatcatcaaaggcacgaacaacgtgaacgatggcatcagtttgacggatgttttcaaggaacttgttaccaagaccttcaccttttgaagcacccttaaccaatccagcaatatctgtaaattcaaaagttgtgtgcacaatcttcttagcaggaatcaattcttgaattcttgccaaacgcttgtcaggaacttcaaccattccgacatttggttcaatggtggcaaatggatagttagccatttcggcaccagccttagtaatcgcattaaacaaagttgacttaccaacgtttggtaaaccaacaataccagcagttaatgacatttgttgtcctctttttctaaaatcaattttttatttttacttacttgtctattttatccaaaatttggccgagcgatacgatcttttggcacatattgctctttttttgcattaaccggatcattcgccttagttaatagcttttttagcttccggttaaactcgctgcgcggcatcatgactatgtgcccacaacccatacattttaatttgatatcagcacccatgcgcaggattttccaatcattagtctgacaagcatgaggctttttcatttgaactgtatcagccaaattataaacaatttctttagccatctaaatcaacacctaacaaatcaagaatgcggttcaattcttcagtcgaagcaaaatcaatcgataaatgacccttacctttttgtgtttccgaaatattaacactagagccaaacttgttagctaattggctttcactagcgcggataaaagcagactttttagcagttttcttgctgcgtggcttcttagcattcagttcattgacaaccgcttcaactttacgaaccggcatcccttccttgactactcgcttagccagcgcatcaatcttttccttatctttcaaacttaaaagcgttctagcttgtcccatcgacagttcaccatgttggagtaaacgcttagtcttgctaggtaaagtgagcaaacgcaaataattagcaatatatggtcgcgacttgcccatccgcttcgaaacttcttcttgcgttaagccaagattcttctgcagcatttcataagcttgcgcctcttcaagtggagttaaatcttcacgctgcaagttttctagaactgccacttccatcatttggctttcgttaaacttgcgaataattgctggaatagtcttcttcttagccaatttagaagcacggaaacgacgctcaccagcaatgatctcatatccattaactgattcgcgcacgataattggctggaaaacaccattttccttaatagaatccgacagttcttttaagctcttatcatcaaatctttttctaggctgataaggattcggccgaatatcgcccaaatcgagttcttggacttcttctgcctcttgaacttgaggctcatcctcaaataaggcttcaagaccacgacctaggccgcccttttttcttggctctttacttcttgagtctcttgtcatgagcttttaacacctcttttgctaaatcatcatataccttggcaccacgagattttggtgcatattctgtaattggctgaccataacttggggcctcagctaatttagtaattcgaggaatgatggtcttataaactttcttgctaaagtaggactgcacttctttaaccacttcagcacccaagttagttctggcatcaagcattgttaacaaaacgccttctacgccaagatctttattaaaatgcttttggactaaacgaattgtgttcaaaagttggctaagtccttccatagcataatattcactctgaactggaatcaaaattgaatcagatgcagtaaaagcattaattgaaagttgccctaatgatggcggacagtcaataaagacaaaatcatattgatcgctaattgcatctaaagctgactttaagcgtgtctcccgagccatcattgaaattagttccgtttcagcaccagacaagttgattgtggctggaaccatatctagctttggcgttgaagtatggtgaatagtatcttgaataggaatttcgtcaatcaaaacattgtaaatgtcctggtcaatctctgatttttcaattcctaaaccagaggtggcgttaccttgcggatcaatatccacaattaaaacgcgataaccacggtcggcaattgaggctgctaaattgatggtcgtagtggttttacctacgccacctttttggtttgcaaccgaaattacatttaccatattgttcatccttccctattacttccttttcaattcaattgtgatcttataatcatccggatctttattttctgttactttgactttaattcctgagtcttcggctaacttaaccgccttcttaatggtgttaatttgtacctttaagtctttaggaactcggctaacgacccgcttagcttcttttttagccttaggcttagggttaaagtaagcatccacatctttcacaatctcttcagtttgtttaacgtttaagccttttgcttcaatttctgtcaaaacgcgatcttgatctgcattacttaagccgatcattgcacgaccatgacgagcggtaattttgccagcaatcaaagcttgctgcacattatcatccagcttcaataagcgcaatttgttagccacataagattgagacttacccatatttttagccaaagcagtttgagtcaaatcattcaattccattaaattggtataagcttttgcctcatcaattggatttaagtcttcacgctgtaagttttcaatcaaagctaatgaagcagcttgatcatcactcatattcttgacgatcgcaggaatagtctgccagcccaagcttttagctgcacgataacgtctttcacctgcaataatctcatattgctcgtcatcgccatcttcacgaactacgataggttggagcaagccatccttatcaagtgtttcagctaattctttaattgaatcatcagaaaattcacgccgtggttgatagcggttaggaacaatcttgctcaattcaagatcttgaacctgtttattcttaggaatttcatcatcatgatgcataaaagaaaataatgacataatatacccctttctgtttaatgaatcggtttgcgccgcggggtgcctgcttgacgtggatactttttaggtgttgctttgactttttgaactaagattagagttcgttcttcttcgctctcaggtagagtcaattcttcttccttaatcagcttaccgcccagcaattcaagagctttttgaccatcatccaattcatcttcggcttttggtcccttgagggcaataaagtaaccatcttttttcaccaaaggcaagcaatattcactcaaaacactcatccgcgcaaccgcacgagcagtaacgagatcgaacttttctcgataaagcttattttgaccaacgtcttcagcgcggccatgaactaattcgacgtccttcaagtctaacttagtaattaagttctttaaaaaagtcaatcgttttgccaaagaatcaacaatagtaatcttcaattctggctgcaaaatcttgagcggaattgatggaaaaccagcaccagcaccaacatcacaaagagtagcaccatctttaaaaacatcgccaaaagtaaacagcggcgtaatactgtcataaaagtgcttaaggtaaacctcatcttcttcggtaattcgtgtcaaattgacatgctcattaacttcgatcaaataattaaaatatattttaaattgttcaatttgttggtcagttaatttaaaattgtgttttgatagttctaaaataaatttttcaggattcatttttcacccgtgaaaccgtgtttcacacctctaaatttaacgcaaaatgcattgattagtaaagatatttcatcttatcaattatgaagtatttttactcaatcgtcaaagttttgccgcccgcaaaatagggtataataaggcgcaaaggagttaaaaatatgattgttactttaattgttttagcttacttagcatataaaacatatttaggctataaaacaggctttacacgctatatcatcggtttaatctgttccgccattgtctttatggttgccattttcatgcaaaatccatttggtaattggctatacacacaatacactggagaaatgattaagactaactccactaacaacgtggaattaatgattgcacgctttgtcgctttctttattgttttcttcgtgggcaaaatgatcatgaagattgtcaaaagctggattcctaacaaaaatccacatgcgactaacttaggcagtattctcgacaatgtcttgggtgctctagcctccctaattgctagttattttgttgtttatgtagttttgtccatgttcaatgcactacaaaatccatggtttatgcagcaaacaattgattctagctttttgaggtttatcatttacaacacaccggggctttcaaacggtgtcttcaataatatctttaatattggcaaaactgtgggataaaatatatcaaaaaagatctgcttgtatcatactgagcagatctttcttgatatgttttaactaaattaatactacatttatgaaccaacattcgatatacttattagcgcaggaagttttatgagcggcggctggttctcccccccggaggtgaggcctatgggctacattgatgaaagggttccagccatgtcgatttacgagagtatctccttgatgcttttgttcggtacatttttgttggctttgctgacatatattgaccaccaccaaaaataaaaaacgccgctcaaacatactttggccagttattgagtagcgtttaacgtaaaatttaacatttgaagccgccgctcttaaagcgggctgcttggagtccctaggactcctttttctttagtcattatagcatatttcactaatcaccgaaattatcatattcaatatgttcatcattataaacaaagattgcaccaattcgatcagggttatcatgccaaccctttagtggcttgccagcaaagaataatcgtttgcattcaatttctgcttcaaccgatgttttggtaaaagtagtcacaccagctaaatcagtctttacaggatacccggttctaggatcaatcaaatgatgatactttttaccgttaactactaagtagcgctcatatgtcccactagtaacggctgagcattcaggcaccataactgacgtaatattgtcgcctcgcggctgtttaggatcttgcacaccaattgaccactggccactaattcttttaggcgaatcaccaactaacaagatattaccgcccagattaataattcctgcttcaacgccatatgcacgccacaagtcacgaattcggtcggcaatccaacccttagcaattccacctaggtccagctccatgcccttcattttaagaaaaacagattggtcactgtcatttaaaaccaccttaaatgggtcagttaacagcattctatctttaatttcttcatctttaggaacatgtgcgcctttaaaaccgatatgccaaagcttaacaactggtccaatcagagcattaaagccaaaattctcacggctcttttctactgccaatttaaccaaaccatacacagcactagagacctgtaccggatgttctccagcagcatgattgatatccattacttcagattcatctcgattaacggtaaaaatatcttcgtaatgatcaattaaatcaaatgatttttgcaatagatcacgattttgagtaccaaaaatctgcaatgtaattgaagttcctaaagcatgatgatcaccaaccacctgctctaatgctaaatctttaatcataattatttctcttccaaatataaatcacgcaacgcctcacgtagttctgtcgttacgccaattttttcttgtaaaaagttatcgaaactaccaaaattctgctcaatagcgattaatgaagtatccaaaaaagcatcagaaactgaacctaaaattcgcatattagcgcgaaaacaaagattctcgccctcttcttgcatttttttatctcttttggcccgatagttattaagcatataatttgagtacaaatagtcctgtctaattgtttccatatctacgccaagcagatataacaagactacagttaccaatccagttctgtcttttccttctgaacaatgataaagtacagcacctttttcagtattggccaacagctctaaaattttatgcaagctatgttgagcgtgttctttcaatacatgtgacttgtaacgctcacacatcattctaaagccagcatactgatcttgacgataagttgcgaatacttgggttaagtctttcttaccgcctttggtgttgtcatcaacagaaattggaatacagaaatgctctacgccagggattttgctgtctggacaatggtcacattcagttggtgaacgcaaatcaataatcttagtcaagccataattgagcaaaaactcttgatcatgtctcgttatgttgctaatcttgcccgttcttaataaccgatgcatcttgaccttacgtccctgatagccaacatatccgcctaaatcacgcggattacaaactttttctaatggcaaaatatttggtttcattaatttcatctctttattaagtattttgataaaaaagccggatagtgtccctatccggtaattttactatcacgtggtaagtcacgcaaaattatttgttagcttgttcaacaaatttaataaagttagccatcatagcatctagttgcttaatataatcttcattggtcaaatcgccagtttctttatcaaaattgcttgcagcaccgccaattaagatttcattgcctggcaaaacattggcactcatgtctggtgaaagcaagatttcacgagcatcttcttgcgcacgactagatccttgaataccgtatgaagtaccaacaactgcagccggcttcatcttcatcacattaggaccagcatgtgaacctaaccattcaagcgcactctttaaggcagctggaattgagtgatcatattctggtgtagccaaaattacaccatccgcattcttaacatcctcgatccacttcttagtaacatcatctggctcatcagttctacagaaaggcttaagttgatcgatttctttaacttcaatatcagcttgctcaccataacgcttagcaataaattttgctaaaaaacgattgaaagaaaatggagcgtttgtaccaacaattgctaaaattttcatttaaataagccccctacttagtaagttgtgcataccaatcatcaacttcatcaaagaagtgattcaaaaacttaagtgtacctgcatcggtcaagtcgcctttatcatcaaattgttttggtgccaaacccatcataaattcgtcaccagcaaagacatgagcactaaaaccaggtgcgcccaaaatgctcttcaagcgagtttgcgaacgagacgcaccttgaggcattggtgaagttgacacaataactactggcttatcatggaatgggtgaacagaactagaaagccattcaagtgcactctttaaggcacttgaaaccgagtgttgctgttctggtgaagcgatcaaaaccatatctgcatcagcaatttttttacctaaagctaatacgctagcaggagcatcaacgccttctttatacataggcaagcccttaacagtcgcaaagtcaaaatcatacttatcgcctaagtccttaataatgactttaagtaatttttcgttaaatgagttatcggcattggagcccgataaagctaataccttcataaaaaccacctttcaaaaatcctcttagttatcattatagactaatgtagcttaatttatgtcattttaattttaataacaacaagaaaaaacgccttcgataatgaaggcgccctctactgaatgaaaagcacaaatgattggtgaaatttctatgccaagttatccttaagcgaagcttcttcgtcggcagcaaacattgggttttcttgagtttcgctgagacgattgttaagcatagcatcgtggatttgagcattcaacacattgacgatttgagtttggctgaagcttgcaatctcattaacaatcaatgcagccatacctgtagtagaaatccagttagcaattacgatgtcatgaatcttttgatcatcgtaatcaacatcaggatattgttccttgaacttttcagttccaagttccatcaaagtgtcagcaatgatcttgctaccaaacttgccatcaacgaacattgctctaaacaagttaacatgagcttgagcaaaatcaatgtatgacaaatccaagtcaatcaaaggttcaccaacgtacttttgttgtaaagtatgtgttctcaagtcattagagattcttctcaaaacttgattgcgaagatcatccatgttgttaaattctagatacaaaggttgggttgagaagtgtcctgctttagcaatgccacgagcagtcaaaccttcaataccatccttgattgccatcttgtaggctgtatctaaaatcttgtctttactaatttctttttttcttgccattttaatgcacctcaatcattgtataaaacatgtgcttttcaatacacttgttttcttttcttcatcactataatatatccaaaaaaataacaattgcaagtcttatacactaacttattaaaaaatattataatcgcttaaatagcgatgagccgttgtctcctgtaaattgatcataatgtgaagaagccatttcaataactgcttgcttgtccaatccttgtgcagcacaaaacgaaaagaatgcagcagataaaatatagccgcgttcacgatcatctgtcaggttatctgagaacttcatattaatcgaatgatttgcataatccgttgtcaattaaatcgatttattttctggtttactactcattctattgcaacctcttttttgttctaaaacaaataaaattaaaaatttaaaaatttctattataattatattcccggatttaaaattgaagtgcaacactaattgttaaacaaaaaggccatgaagacctaaacttgaagtgaccaaaaatcaagaaaggaagatcttcatgaccaactcaaattctagcatttccaagcattatcatcaattgaacagcgaacaacgtggacaaattcaagctctgcttgattctggcataacctcctgcactgctatcgctcaagaagtaggctgtcataaatcaactatcagccgtgaaattagacgaggcagtgtcctgcaaagagacagcagctatgtcttgtatgagcactattacgctgatactgcacaaatttatcatgaaaagcgccgcagaaactgctataagtgtaatccactgcaacactatgccgtttttttcagaatgctaagcagacgctttaaagccaaatttgatgccactagcattgatgaattcgttggtgaatttcacaggattatgccaaattatccatgtcctagcacgcccactgtctatcgttatattgatcaaggattgctggatataagcaatatcgacctgccaatgaagcttaaaagacgcagaaacaaacgccatcatagtcatggtggccatgctccgcataaaaagaatcttggcaattcgattgaacagcggcctaaagaagttgaaaacagaaaagttcccctgcactgggaaggcgatttggttaaaggcgtcagacgtaaaaatcaacctgccttaatgacactgactgaaagaaccactcgttttgaggttgttatcaaaattcctgactatcgggccagtacttgtcaaagactgcttcaaaaggagattgacagacatcctaattggtttaaatcaattacgtttgacaatggttctgagtttgcggatatgaccaaaatcaaaggatgtcagatctactttgctcatccatattctccttgggaaagaggcacaaatgagaactgcaatggacttctgcgtcaattcttccctaagggcaaaagcatgaaagataagtcagctgcttatgttcaacaggcaactgatgccattaaccgcaaacatcgtcgaatcctccaatatcacacagcagaagaactcttcaagcaatacgttccttcatagcctaactgttgcacttaatttgacaattcaggttataattatattacaaaatcaaaagaattagaaagcgtgtttttatcaatgaaagtttcagcttggcgctcatcatgcacctcaattttaatcgggaaaaaggcctctctttctggcagtatcatcatcggtcgtaatgaagatgctaagactgcttggcctaagcatttagcctttaatccacatcgagataatgtacagaaaaaccattttaaatccaaagacaataagtttgaaatggatttaccaacagctagctactcttattcttcaaccccagaatggacagataagtacggagtgttcgaagaagacggaattaatgaatatcatgtagcaatgagcgccaccgaaagtgcctacgcaaatgaccgcgttttagctgttgacccctttgatactgacaaaggaatcttagaagaggcaatggtcaccgtagttttaccttatgttaaatccgcacgtgaaggcgttcagcgcttaggagaaattgtagaaaaatatggtgcagcagaagctgacggaattctctttggcgatcgtgatgaagcctggtacatggaaatcggttctggccatcattgggttgcacaacgaatcccagatgattcctacgctgttgtcgccaatcaactagctattcaagaaattgattttgccagtgacgacttcatgtattctcaagacctgcaaaaatttgtctacgacaataaactctggcctaaaaatcagccattcatttggcgtgatatttttggcactcatgacgatagtgacttacactacaacacaccacgagtatggagcggtcaacgtctgcttactccatctgtagcacaagaacccgaaagctttaacctgccatttattcgcaagcctgatgcaccaatttctgcgcaagacgctcaacgcgttttaagcgatcactacaacaacaccgcctatgatttaaccaatcagaaaaacagaaataatgccactttcagacctatctctgtggctactactcaggaatcacacttgcttgagttaaacggtgaaaacatgattcactggctagctatgggtgtggctgcgcaaagtgtttatgtgccattctatcctcaaggcactaaggtaccaaatacctggaaaaatggaaaagaaacctactcaccaaattcagcttactgggtctttaaactggctagcgtcctggttgatcgtaattggggtaagtacggcaccgctttaagcaatacgcaaagtactactaacgaaaaattgcttcaaattagacagcaatatgatcaaaaattagcacaagaaaaggatcaagaacaacaaattaaattagtggatgaagccaatgccaaattagctaaaactgctactgatgcttataaagaattgatcgctaaactaatcaccgaacaaactggtgactcaccgttgcgtttccaaatggatcctaacttataaacaaaaatgcctcaatgaggcattttttcttactattttttcttagtcattaagccgtccatcatttcataaatatggtcggcgtatttttctagccgcggatcatgcgttactagaataacggccttgtcacgctttttcgctaaatctttaaacaattgtcctacttcttccacattttgcgtatctagcgaagcagtcggctcatcggctaacaaaatatctgggttagcatataaggccgtcgcgattgctactcgctgctgttgcccaccagataattcatttggatacttattaaccagcttttcaatccctagctgcttgagtaagccttgcaatttatcttgcgacaaattattttgcttttttactttatcaatcaaagtaaattgctctttaactgtcaaaaatggaactaaattataagcttgtaaaacaaagccaattttattcaagcgtagttctccactttgcttagcagaaaaattactaatgtctcgaccattaatcaaaatttcacctgaagttggtttttgcaaggacccggcgatcgtcaaaaatgtacttttaccggcgcctgaaggccccataattaaaaccacttcacccttattagcctgaaaattgatatctttcaaagctgcaactttagcttcgcctttaccataaactttattaacatcttttaattcaattactgccattttactcaccaattgcctttgctggatcaaccttcaaaattgatctaatcggaatcaaactaccaataatacccatgactagcatccctaacgtaccactaatcataattgctggcgtaaaagtcattggcacagctgctggtaaagttaaatcagttaaccacatcaagataatcgcaattacaacaccaatagctactaaaattatggattgactgatcgttgcaccaactaaagttttacttggaattccttgagcccgcataacggcaaaattatgcattttttgcatagttaaaatatataggaaaacagcaatcacgatcaaagaaataacaaataagaatccaatcatcaattcaaaagttaagttttgagccgtatatcctggaagcttattaataaaggcttgaattgggtatgtcttggcatccttataattgaatttataattgctattctttgaaacaactgcagaagcggctacattaggagcgaccatccgcagttttttccaagttttcattgagccataaacaattggcgcaatattaatcttggcgttatttacaaaaccaacaattttatattttttcttagagccattcagagaaatttgatccccaagcttgtagcctttgtctttgaaactactgtctactgtaatctgattaccattctttgcttttttcccagcaattatatcttgatcttgataaataaactggtcttttttgatgcctaagaattgagctgaaattgagttttttccctttttcttagctacaattcctaattgaccaataattgcttcattcttgccaatttttgcgttttttagatcgtcttttgtcagaattgactgactcatgctgatattggcatttttatttaaaataatcttttgcgcattccaattttcaattgcttgtgtattctgacttgctaacccaacggccaaagatgacaacataaaaattaagtagctgatcaaaaagatcatcaaaataatcaagccatagcgcaatttttcatgcttaatttctttcagtgctagaaacataactacatcccctttgctagtatgtccaggctcttcttatagcgcgccaagttcttttcctgattttcgggatctgataagcataagttgataacttcatgactaagtaccatggcactccacaattgtggccccatattcaacaattgtcttgaataaattttgaaattatctggcatcaagtactcattttgcgacatatgcaatttcatcattggttcatatttactgtattgaactttatcaataaacttaactactcttgcataaaaatgattaggatcaaatttttcatcagaactcatcccagcatgaatgtcttcaatagcgatgtgatacatataaacatatgcatcaattaaatcatcaaaatatttataaaatgctcctcgagcaatgttggcattcttaacaatatgtgacaccttagcatctgctaacggataagtgctgaattcttctaacaacaccgcttcaatacgtctacgtttagcagacggtaaatttttaaaagtttgcttaaccattttgttttccccttttccaacacaaatgacgacttgtcatcaattacttatatcatagctgattttgacgagttgtcaatacatatacaaaaaaaagaaggcctctgccttccttctctaaactaaaactcgattatagtagtacaacctagcaacaccatcacggacgctaaatttgcttaatgcacaattatttggcgtatctatcttgtccatgtcgccattactcaaataatgagctgccatcattcgaatcaaacgaccatgtgccactactaataccttaccttctggatatttttgatatatttcgtctaaaaagttagcgcaacgtgcttcaaactctccgtagccctcaccatttttggcatatttaacatagtcgcgagtaacttttccccatggatcaacgacatccggatattccttagcaatatcatccatcttcttgccgtcccaatcaccaaaatcaaattccagcaaacgtttgtctaaatttaatttctttttacctttagtaaaaattttcgcagtctctactgctctcttcattggactggaataaacaacatcaaatttattttcatcaaacttagcggcggattttttagcatattcacgaccaaattcattcaagtctgcgtcaacttgtgcgccctgaattcgattatctttattcacgtctgtttgtccatgacgaataaaaactatttccattttttaccaatgtcattaagttaagacattgacaattaagggtgcttttttagagatcgaatcatttggattcgatctctttttttgtataaaataaaggcgaaaagaccagccttttcgcctatcttatatattatatattttaaaccttcaaaattattgccagaaagatggtgttaattatgaaagcccttcataagaatattctagaacgtcttgatcaaattatcaataatactggggatcatattcacgattttattaataatcctcatgcttttaccaggaaacgcactttagatgcagcgacagtccttaaaactacaattaacatgcaaggtcagaatttaaacagtgaactctttagagcttttggcgaagatgcaactaaaaagaacgataaagtagttagtacttctgcctatgttcaacgcaaaagccagctttctcctgcttgttttaaacatattctgactgtttttaatcaaaatctatttaatattcaactttttgatcatcactaccgtttgtttgccattgatggctctgactttaatcaaatctggaatccgaaatcgaataacattgtacaagcttcttctcataaaaagaaaccctattgtcaaattcacgttaatgccttatatgatctattgaataatacctaccaggattgtatttttcagcctaaatcagaaatggatgaacgcaaagcggctgttcaaatgcttaaagctttgaattgtggtccatatattgtaacaatggatcgtggctacactagtttcaatatgattgaaaactgcaatcgcctgcctaactgtcattacataatacgaactaaggctggacaaggcggagttaaagaaataacgacattgcctgatcaagaatgtgatcgtgagatttcctgcctggtaactacttctaactattactacatcacgcataaagccagtgagaatattcaccatgtccagcatcattatcgccaatatattaagtatcgctctaaaaatacccaggatctaagctgggattttggcgagttatgcacaataaaatttcgagcctgcaaatttagaattaatgatgccaaatcaggcaaagaagaatgggaagttgtgctaaccaatcttgatcgaaaaaattatccgctaaaaagaattaaagagctttatcatctgcgttggggtattgagacctccttcaagaaattgaagtattctttaggcagtgtacagttccattccaaacaagataaatttattgaaatggaaatttatgcccatatgattatgtttaatgcaatcagtcaaattgatgcacaggcctatattccgcaaaagcattgcaagtatcaatatgccatcaatttcaagcaatcatgcttgattattcagagcatgtatttggcttcttctttaacgcaagattttgaacggatccttattcagatcagctattataccattccaattagaccaggccgcaaggacaagagaaatattaagcccaaatcagctgtatattatttatatcgcgtagcttaaaaaagcagaatctgtgctatgccttatttgttgtacgaaaaaagcaccaatttaaccaattaaatgttaaatcagtgctttaaaagtctaatattaattgtcaatgtcttaacttaatgacattgcattttttacatcaccttttcttaaaatcatacccttatttaactaatctttccatttctttactgtttttttagcgttttgaaatttaaaaagcttaaaatataaatagataattagaaaggggaaacattatgtcccgcgttacaattgaaagagatggtctcaccttagtaggagaccgcgaagaaccattcggcgaaatctatgacatggctatcctcatgcatggttttaccgctaaccgcaacactgaattattaagacaaattgccgatgatctacgcgacgaaaatgtcgctagcgtccgttttgactttaatggtcatggcgaaagtgacggcaagtttgaagatatgactgtgccaaacgaaatcgctgacggcaaggcaatcttagaatacgttcgcaccgatccacatgtacgtaatattttcttagttggtcattcccaaggcggtgtaattgcatcaatgcttgccggtctttatcctgatgtgattaaaaaagttgtccttttagcaccagctgctcaattaaaagacgatgcacttaaaggtaacacacaaggcgcagtctatgatcctaaccatattcctgatactgttccactagtcggcaataaattaggaatgaaactaggcggattttatctccgaaccgctcaagttttaccgatttacgaggtctctgcccgctttagtggcccagtatcagtcatttatggtactaatgaccaagtagttaaccctaaatatgctaaaaaataccatgatatttatgaaaatagcgaacttcatgccattacggatgtagatcacagattcactggtcaatacaaaaagtcagcatcagatttaactgctcaatttttaaaaccattattttagcgccgagtaaagtcgaactcagtacgaaagacgtaatgatccttagtacttacgtcaggttcaaattgaaattcaaaatcattaaagtcctgcaaatctgtgggattttttatttgcttctcggcaatgtagcgcaccatttcaccacgagccatcttagcgtgaaccccaacggtcttccacttaccattttttagttcctgaaagtcaaccgtaattaattgtcgtccttgactcaaataaggtttaaccaaacgtgtatattgcttggaagccaaatcgataactatattatcttcttgaaataaattttcagcgatatcactgccccagaaataatacaagctataatcacgaaaaccaaccattttagtatttaattctaggcgatatgggcaaacaccatcaaaaggccggagcataccataaaatcctgatagaatccgcaaattcttttgaatatagtcaagtgcaggttgtgtaaataaatccggagccatatattggtattgaattcctgaaaaagccaaaattgcaggggttaatcgttcatccaaattcatattttctagttgcaatatgctttgcttagtcacattttcactagcatgccaaaggtcttttaactgttcatttgaccttgacttaagaaatctttctagaattcgtgtcttatccaagaactgcggttttgactgaattggaaatgaatcacgatcaattttcataatttttgcaggtgcaataataattttcatttttagattttgttcctttacggtaaacttaaattgtgattaataaggaggaaaaataatgaatcctgattttgcaattgtcttaaattatcaacttaatgataaggctgatgccgactttttagtaaaaacagcccgtaatatcggtgctcgtgcagtgatgactgacaggcaaactgaagatttcaaaacagcttgcgctaagtatactatttttttagctaatccagaaaatagtactgacttaactaaggataacgtcattgataccatggtcaataaccgtaaagctggtaagactacaattattaatgtgcccgttgaagcaggcaagttttctgccgcaactcaagcaatgctggatacgatcaatgattggatgcaccaattcggtcacgccttcaacgaaggaaaaactagtgctttaaccagtagcgatggctttattttagaaaatcgccacgcaaattaccaaaaatatgtcttcttacctagtcctcttcctgacaaaatcgtggtagaaggcctagtcgaagaacctaaccgggtagaatggattgaacatcgatctgatcttgattttaactataaggatcaaaaattaactattaacttagtcaaaccagatgatgagtttgcttggcaagtgttgcgaattcaagcccaccgacctgaagatgacattttagaaacgaaattttagtaaaaaggcgttctttgtagcagaacgcctttttacaaccttatgtaattgctatttctattttccaaaaaatttattcttgcttaagctttaactactgaaccattatcaaaaaattctctaaaacgacgtgcttctttatccagagtaatttcatcattaacttgcgataacttatagccaacaaaataaggtggcgcttcaaaacgtgtaatatatttagcacaaataccgtcatcattacgcggataaaagaatagattataagaatcgcagcggccattatacatgatatttaacaaatacttggcaccactttgaatccagtcagcccacaagtcaatgctatttttatctaacaagttaatattgagctcagtgtagccttgaacggggtgttcagcaatgttaacttctaccccacttttttcaaaaagggtctcaccttcaaaattattcgggtgaatatatttatagccatcttcatgttcaaagccaactatctgcatatgcgggtgaatcaaggaaccacctgaatgtggaccatagttcttgtaccaaacaattgactcatattggtcactagcctgcactttttcaaaacaagctagcgcaaaatgcatcaacttgcgattatgttcctgcgtataagtactaatatcgccgttatgatcactagattcaattagtacagtctgccaggtatcgcgcaaggtcgggaacttattcttaagccaaatcatgtcatcttccttggcgtaaatatcagttaaattttcaacatcacaaaatgggcaaacgtttttcttcttatccttacgataagattgcggtttgcctttagcaatgctcatttgaaaaacaagtggatcattagtcatatttattccttttttttatcctgaattgtcaaattaagtgcaacagttaggttatgaagagatatattgcttgaagagttcctctgctgtgtgatattggaggattcggcgatatttgtggttaatggcatcagttgcctgttgaacataagcttttgacttgtctttcatgctcttgcccttagggaagaattgacgcaaaagaccattgcagttctcattggtgcccctttcccatggagaatatgggtgagcaaagtaaatctggcagcccttgatcttggtcatatccgcaaactcagagccattgtcaaacgtgattgatttaaaccaggcaggatgtctgtcaatctccttttgaagcagcctttggcatgtgcttgcccgatagtcaagaatcttgataactacttcaaagcgtgtggttctttcagtcaaagtcattaaagcaggctgattcttgcgtctgacgcctttaaccagatctccttcccagtgcagcggagcttttctgtcttcaacctccttaggacgctgttcaatggaattgccaagatgcttcttgtgcaaagcgtgaccgccatggctgtgatgacgcttgttcctgcgtcttttgagcttcataggcagatcaatattgcttatgtccagcaagccctgatcaatatagcgatagacggttggtgtgctgggacaagggtagcctggcatagtccttttgaattcaccaacgaactcatcgatgctggtggcatcaaatttagctttaaagcgtctggagagcattctcaaaaagacagcataatgcttcaatggattgcgctgatagcagtttttgcgacgcttctcataataaatctgtgcagtatcagcgtaatagtgctcatacaataaatagctgctgtctctttgcaggacgcttccgcgtttgatttcgcgactgattgtcgacttatggcagccaacttcttgagcgataacagtacgggaagttatgccggaatccagcattgcttgaatttgtccacgttgtacgctggttaattgatgatagtgcttagaaatgctagaatttgaattggtcatgaagatcttcctttcttgatttttcgtcacttcaagtttaggtcttcatggcctttttgtttaacacttagtgttgcacttcaattttaaatccgggttccttttttttatttaaaatagtttaaaatctaatgggtaaagttttactataatgtaaaatattttgtagctttactagcataaaaatacttgttatactttgttaaagcaaacgtttattcgaaatttatcaagagacgggttttaataatgcaatctagaacagaaatgagaaagcgaaacaatcgcaacaatctctatcttattattattggcataattgtcgtaattgcaattatttgtggctttgtcattcataatcaaagggtagctgctgaacgtagccagcgtgaatatgcttctacccacttcaaccctaatgtaacaatttatggtgtgcaagtaggcaagcttactgttaacaaggcgactgctaagatcaataaacaagctgataatgtcgtctttttaagaaataaaaagattattgctgaaaaagacgacaaggttcaaactatcagccaagctgaagttaaaaatattttcactaagcagcatactgatttgccaagcaaacaaaaatacgttttcaaatccgccaaaatagatgaagcaaaaaagagtttgcaaaaaatacaaaatgctgtagtcacctataagatcaatggccaggaattcaagctaaaagctgatgacctaattcacgaagttacttacaaaggtggtaaatataaattcaccgatgtaaaaaaactgcatgctaaaatggaagcgatcgatcaagaagtcaaaactctaaagaagagttataaatttactgttcctactggtaacaaagtcaatggcaaaacgattacggtaaaaaacgaaagctatggttggggaatttatgtcaagaaggctgtggctgcagtagaaaatgcttttattaatggtcaagatgttgttgatggtagtaagtatatttatggcgagggttatagtacctatgctcatggttatggcaagagcaatcatggtattggtaaaaactacgtcgttgtctccatcaaaaatcaggaactatgggttgtccgtaaagggaaagttgccgttcacttaactgacgttgtcacaggtactgaaaataagagtaacgctactcctaaaggtgtttggtatatcatgtacaaagaatcacctagcgtattgcgtggttataacgacgatggctctaagtatgcctccaaagtacaatattggatgccatttactttgagcggctgtggcttacatgacgctagctggcgtagcgattggagtaagtcagcctatcttactggtggctcacatggctgtgttaacattcgtccagctgaaattagaagtgtttggaacaacgttttaactaacgatgctgttatcgtatattaaaaaataaagattaatcgcctacttcaattgaagcgggcgatttttttgcgtaaaattaacagaaaagatatagatttttgaaaggatcaaatatgttagtcatcggtattatttgcttggtggttgctgccatttcttactttaaataccttagtgaaaagaacggacaagctaaccaaaaacaagctgaaaacaaaaatgaggcaaaatggcagcgcactttagcaatcattttcctcgttttcggaattttattaatcggttattggattgcattacgctaaaaaagacgtgaattttcacgccttttttaaatataattgattaccacattacccatattagctcttccctttaaaactaaggtaggaccgccgccattgctttttcctttaactattacattaccaaggctaatgcttaattgattatcaatctgccatgataagggaacgtagagatttacatttcccattgaagcagttagattaagcacgactgtatcacctgctgctttagcatcatcaagatagatattggcattaccgaatgaagcttcaagattaattgactgtaaattttgtgaatgaatataacgtgaagaatcgccagccatcttttgattaattacgatattgtcaccatcttcaatcacatcttgaacatgatgatgtgttacttttgtctctgtatcagcatcgtcactatcatcgtcatcattccaatgaaaactcttcttgataacaatttccggatcttttttaaaaagcaagctcaatcccattgaaacaagcaaagcaataaacaaaatcatccaagaggataagaactttttaatgcccaggggacctgcataagtaattactaaaaaagcaattgagaaaacggacaccacaatgctcttatcaagcaagcccttaattaagcaagccacaaaaatgactgtcaaaataattgtccaaacgctaattttgaagcttaataagcctaattgactgatcaccaaaagcgcagctgcagcgattagtcctactccccacaaaattcttgcaaaactgtttttcattataaagaccttctttcatctaagcgtgtgcgtaattctttgtagtatcgacgggatgcatatacagttttataagtatcatgaaactgtatcttgcaatctgaaatcgaccgagttaaaccataaatttgatctaaattaataattgtcgatttggaaatccgcatgaaacctgcgcccaaaatattttctaactcatacaatttatgtttaaccaagtatgccttatcttgtgtatgcaaaattacctgcttggcatctgtttcaaaaaacaaaatctcgttcagtggtaagtagtaagaaacattgtttctaaaacattcaatctgatcattgtgttcaataccttgtaatttcttataaagctgctctatttccggagaaatatttttagctttaataatcagttcatcttctacggcatctggatcaatctcaagttttactttcatgtttctcactcccttctgaatctgatatttatattaaaaaatatttcagatagcttttccatagttttgaactaagtggtaaattttggcttctaagtggcaaaaaaataagacgacctctgtcgtcttattgcttattatcaatgtaaactagtaaaaaatgttatcagtccaaaaataattcctggaaaattagccgtgaatagcggccaatctttcttttcaccaagaattgcataaagtacccagatcgtgcaattaattgcagcaaccaacggctgaaccggattaccataatttccgttcaaattattaataatttgcggaatatatgaaacatacatcagtacagataataccgacccaatacgtccaatagttaaaacagtttttcggtctaatcctttgaattttttcaacaaatcgctcctttgtgcttcattataagaaaagctagagtcgattgcaaaaatcatactttagtggacaccttccattagcacattaattctcttaactaaaaagaacattattaccgcaaaggctacactgaccaaaccaacagccatgaaatattgtacttcagtgccagttgaatagaacttaacaatttgtgcattcactgcttgtccagttgcatcagccatgaaccacatactcatcatttgcgaacgatatgcattaggggccagcttggtcgtaattgataaaccaattggtgaaatcaacatttcagcaatttcaactaagaaccatgaaccaactagccaaaatggactaaccttgcctgctgtaccataaagcatccctggcaaagccatccacatataagatagaccagcaaaaactagccctgctgcaaacttgcctggagctgttggctgctttttccaatgttcccaaagccaaacgaagattggcgttaaaatcataatgaataatgggttaagagactgaaagttggctgctgtaaagtgccaattaccaatatgaagcacggttctttgagcggcaaacagagctaaaactactgagcctgattcttcaatgccccagaagatagctgcagcaaagaacaatggaatgtaagccttaactcgtgaacgctcaaccttagttacttttgaactacgtagcatcatcacaaagtaataaattggcagtgcaattgctaaaatagtcaataaagtaatgacattgtcaacgttcaattgaccaaagccggccattgcagctaatacaagggcaatcaccacgaacccaataactacccacttaataatattaagcaagtcacctctatcaataggatcattaggcgtcaaactttcaggagaaaggtattttttaccgccccaaacatattgcactaagccaaagaacatcccgattgcagctaaagaaaagccggcatggaagttcatttcattaccaaaaatatgaaagccaaaaccttgtgctgcccatggaactaaccaaggtgcaagaaatgatcctaagttaatcccaaagacaaagatgctaaaacccgcatctcttctgcgatcttcaactgaataaagaccaccaaccatgtcagatacatttggctttaataaaccagtaccaaccacaattaaggcaattgaagcatataacgccgttacaccggctggaagtgccaagacaatgtgacctaacatgatcaaaacgccgccataaaagacggtttttcttgaaccccaaacacggtcagacagccagccaccaactagggttgataaataaacaagtgaaccatagattgacatgattgatgcagccgttgtttggtccattcccagaccacctttggtgactgcataatacatgtagaaaagcaggatggcgcgcattccgtagtaactgaagcgctcccacatctcagtaaagaataacgtggacaaaccctttggttgtccgaaaaatgctgtatttgaatctcgtttacccaaagaaaaactcccctcttatctaaggtaagcaataaaggatattataccacgaaaaataaggatctacttcttacatcaatgtcattaagttaagacattgacaaattgaatctaatctctgtagaaccgaatcattatgatttagttctttttttgcataaaataaaggcgaaaagaacctaccttttcgccctctgattaaattattaaaccttcaaaattattgccagaaagctggtgttaattatgaaagcccttcataaaaatattttagatcgtcttgatcaaattatcaatgatactggaaagcatattcatgattttatcgatgatcctcatgccttcactaggaagcggtctttagatgcagctacagtcattaaaactactattaatatgcaaggaaaagatttgaccagtgagttgtttagagcttttggccaaaaagctattaaaaataacgataaagtagtcagtacttccgcttatgtccaacgcaaaggttcacgccgttgacatgcacaagactgacctggacggcaaggaactgaccagctacaagctgcaaaaggacctgcgattccacttcgacaactagtacaataacagaaattagccaatatacagcaaagtgtctgggaagaaactcgatttttagcccggatataaaaacacagaaattcattatttttagtgaattcctgtgttttttgtttttgaaatgaaaattcgaaggcttcaccttcttgttggctccatattttttcttaaatgcgttctgcgcataccaaatacactcttcatgtgcccaaaaattggctccacatctgacttgcgacagccatagatgcgtttaccttcttcgctttgaagagtctcttttgctttttcttttaaatactgccaattaggattgtagtgaatctgtctttgtcgacctgttttggttttagccaattgggtcagttcttcagttagctggaactcatcagcttcataaattttgaagtttctgaccatgccagtaaatcgatcttttctttgactataatatttgaagttgaagcggacgcctgatttatctacgtaatagtcttcttcttcgttatagtaccagttgtcgacctttgatggatctttcttatattttcgcgtttgttctttttcgtattgggtatacggaatctgatagttcttatctgaataattctcttccagaatcgagtaattgtattcactgccatagcccgcatcggccacaatattttgaaacttatcgaaaattcctctggacttcatttgttctagaaatagttcgaatattctaaagtcagccggattaggaaacagggcaaaatcaactatatattgattagtagtcgctgcctgaatattgtagcctggctttagctgcccgtttttcatatgatcttctttcatatgcatgaaggtggcatcatgatctgttttagagtagctgttacggccagcaaagatctcttcagcttcttcgtactttttagcacgcggaataaaatcttttctaagtttatgtgcgatcttctttaattcacggcgcttggccttattttttgatccgcctggaatggctttaggttctcgatcaattttctcggtcagcttctcaacttctttttccgtttcttgagccagaatctctaagccttgactagtttgggcttcttcttcggccatggctttgactacttctttattgatcagttcttcatataaagcagacacgtcttcctttaacttggcatgatacttctcaatagcttttcgccagacaaaagtgtacctgttggcgtccgcttcaattttagtaccatcgataaaaactgcattttcacggattaatccctcatcttctaataatgaagtaaagtagacaaaacactgcttaattaccttattggcatggtcgcttgatctgaaattattgatcgtgtgataagaaatctttctattgtcagctaaaatcatcatgggcagattctcttctagcattctttcaatttttctgcctgaaaaaactcttctagaataagcaaagagtaaaatcttaagcatcattgccgggtgatatgcaggtctgcctgtattagaagtggtttctaagataacttcgttaggaatagaatcaacgaattcactgataacactggcaatgtgatttgcagggatagaaaaatctaaatttaatgataaagtagtttgtcctgtgatataattttgatacatgtttaagcccactttctattgtttttttgtggtgattaaataatatcaaggaatgggtttaaagtatacaaaaagagcgatgacttcttatgaagttcatcgcttttttcatggcctggaaattagttttttcccagacactttctattattaaactagatcatacatttctggcattctgcaccattttgaattaaacattcgtctgcagtcaagttctcactaccagctaaaactttttctcttattctaacataataaattgagttgcatcgctttttaaaggcataaatataagccttatttaaatctcttgttgttgcattatcttcaacaaataaagttaacgaaattgattgatcaacatatttttgtgcagcagctgtaatatcaataatagcattaggtcctacttcatatgcacccttttcgtaatactcataattgtctttattaatcttataagctggtacataaattcgacccaaatcagcctctttgcgtgtttcaacaggagctactactggctgcaaacttggtgtacatgaagataaataactaattgatccagtaggtgcaactgctaataagttagcattagctatacctgtctttttaattttagtaatcaattcttcccaatcttctttagttggaataactaatttatatttagctacaatttctttaatcttgtctgttttcggtgaaacatcttcatcaataaattttttgaaataatcaccactagcatatgatgaatctttgaatcctttaaaagcaccatacgtttcagctaatttatttgattctttaaatgcatggtatgcaattgtataaaagaaaattcctgtaaattcaactgcttctggtgaatcataataaatatgattagttgctaaaaagccatgtaaattcattgctcctagaccgattgctcgattagctttatttcccttttcaattgaaggagcacaatctaaatctgaagacctggcaacacgattaagcgcttgaacactatcagaaaccaaatcacctaacttgtcagcgctattcattgctgctgcaatattaagtgatcctaaattacaacaaacatcgtagcccgtcttattaaaacttaagtctttattataggtacttggtgtattaacctgagcaatttctgaacataaattagacatcacgatccgccccaatttcttttgtgggtttcttcgattgacagtatcttcatacataatataaggataccctgattcaaattgaacttcagcaatagtttggaagaattttctagcactgataaatgtctttttaatacgtggattattaaggagattttggtattctttagtaattgaaatatctgacattggtttaccatattcacgtttaatatcatatggtgaaaacaaagccatctttttattttctttggctagttcaaaagtaatatctggaatcactacgccaagtgataaagatttaattcttaccttttcgtcagcgttttctcgtttagtatctaaaaattgcataatctggggatgatgggcacttaaataaactgcaccggcaccttgtctttgccctaattgattggcataagaaaatgaatcttctagtaatttcattacaggaattatcccactagataaattcttcatttttttaataggtgcacctaattcacgcaaattagttaagcatagagcaacaccaccaccacgtttagataattgcagacttgtgcttattgctcgtgaaattgattccatattgtcttcaactctgagcaaataacatgaaatatattcaccgcgtctctttttacctgcattcaagaaagtcggagttgctggctggaaacgattactaataatatctttaactaaattcaaggccagttcttcattgccatcagctaaaaataaagcattcataacagcccgatcttcaaaacgttctaaaaattgtttattatcgtttgtttttaaggcatatgctttatagaatttagctgcacccataaagttcaaaaagctaaaattttgtgcataagctaatttgaaaatttctttaataaatttagctgtatataaatctagaacttttttatcatagtaatcattatcaactaaataagctaatttttcttctaaagaagcaaactttttcattcttggttcaatatgattttcaagatattgcttagtagcctccttgtcagctttaaaattataatttcctttttcatctttaaatttagcaagtgcatttaaagaaatatatgaatcattattaagattatcagtcattgtcttcacctgcatcagcaattattttattaacattatttacatcttcagttgttcccagtaactcaaatttatatagataaggaacatgtaatttcttagaaattacattccctgccaaggcaaaagaattaccaaaattggtatttccactagcaataacaccaatacatttttgccgattagccaatttgttcaaaaagtggataacttgcttaggcacagcacctgtagtcccatggccaccagaataagttggcgtaattaaaatatattcttcagaaactgaaatttctttactgaggttaataggaatcctaatagaattacaatctaacttttcgacaaagcgtgctgtattatttgaagtggaagaataatagacaactaatggctttttagaaatcccagtcatcatctttagtctcctctcctgttcccatgacatatgaagaaccattaccagaaaagaaatcatggttttcatcagcttgagctgataattgagcgaatacttctggagaaacataagtttcttctgcggtaaaaggagaatcatagcctaaattttgtaaaaatttacctgcattatacaaactgaaatgaattgcatcatcaaccaaatcaaaatcatcataaagctcgtgcaaatatttcttttccaaatcaattagtttatctaagaaatcaaaaacaaattttttcatttctgcttgtttagctggagctaatttctttacggccaattgatatttgtaaccgctataataattgtgaataaccttatctcttaagatcaatctaataatatcagcagtattaggcaatttacctcttgcagctaaataaaatggtaaataaaaaccaccataaagcaggaaccctggcataattgctgcggcgacctttgatttaagcggatcattgcctgtataatacggaattaccgctttagctcttgcttgtaaagtatcattattaactacccattcatgcgcttcttcaatttgttcactagtacataaagtagaaaaaatagttccatatgatcttgcgtggacagcaaccataaaagcaaaatttgcatagatagcttgctctatatcagtttgtgaatttttaatttgggctacatcacccacacttgattgagttgtatctaataaagtcaatccagtgaaagtgcgagttataagctgttgccagtcatcagataattgattccaagaacttatatcattcgaaactgggattttttcaggtaaccaaaagttttgagtaactctgttccaaacctcaagatccttatcatctttaatgtcattccagttaatagctcgcatatttttgccgttgtcattgtaagcaaattcaactggtgactgtgaatgatcataataactcatatatttgctcctatcattatttattgttttatctaatatatgtgtaaacatactatagcatcgtctgctcaataatacaacatgtggattttgggggttatttataatcgatatattgtggttaagccgttttgataatacaaaattattttcaaatttattttatcttccaaaaataatgtaggtgttgttttttgcttttttgacaaaaaaagtgtctgggaaaaaagtcgatttttaactaaatttaggctttaactcaaaaaaatcccattaaatcaaggtttgtatgtaccaagatttgatgggattttgaaatttctgagttttttcccagacacttttttcatggcctggaaattagttttttcccagacactttcttttgcgatttttgctttatttgttagtaccatctgctcctactggcagggccgggaaaataaccgtgaaggttgaccccttgcctaattcgctttccaggcggatggtcccgtggcactgctgaacagcatgcttgacaatggacaggcccagaccagtgcccccggtcttgcggctgtggctcttttccacccggtagaagcgttcaaaaatccggttctgggcttcctggggaatcccaatcccagtgtctgctacctgcaggatcgcctggccccggtgctccttgaccgtaatcttggtcttgcccttttccttgttgtagcggatgctgttgtcaatcaagttgtaggcaatttcataaaccaggcggaagttggccaggatcatggtgtctgacaaattggtctccagcttgattccatgccggtaagccgaaccctgcaaggcttccaaggcctcagtcaccggactcttcaagttcagcttgatttcttcaaagcgctggttttcatccaagtgggacaaacggatgatatcgtcaatcaaggtcaaaagctgggcggaagattcatggatcttcttgtaaaagccatcccggtcttcgtctttgaccaggtggttttccaaaagctcagctgaccccatgatggactgcagaggcgtcttaagttcatgcgacacattggccgtgaattcccgccggacctgctcttcatggtattcttccgtcacgtcaaccaccaagatcgaagtccccttcaaaatcttgcggctgataatcgggctggcactgatttgaatattgcggccgtttctttccacaatcccctcagtatgagccaagcggctgtttttatcgatgatttccttaacatcgtctggtaaggggtcagtgtcatgcaggcctaaaagtgaaactacagccgggttagacaaaagaatccagtcatccaggtcaatcaagatcaagccttcttgcatggcatctgttaccgtctttaattccttttcccggtggtgcagctgctccatttggtcagcgatctgcttgttctggctgtccagcctggtcaagagcggcttgatttcatcataagccttgctttccaggggcttgtccaagtccatttcattcagcggcttggccaggaaccaggacactaaaaccgccaaaagcatgatcagcaaaagcggcgacaagagcctgagcagcatccgccagaaggagtttctggtgatcgcgatgcggatgaccccgccgttattgagccgttcagcgtagtacatggtcacggtcgacaaggtcgtgctgtagcgctcgctggtccccgtccccttcttcatggcttcggcgacttcctcgcggcgggcatggttgcccatctttttgggattctcttcattgtcgtagagaaccttgcccttggaattgatccaagtaatccggtagttctccccttttaagttcttgaggtacttcttgccgctggtatttaccccgctggccgccaggtcagcctgggaagctagggcagacatttctgtatggtcgaagtcaatgctcaagacaatcgtgcttaagagtacggcaaagaagagaaccagagaagtcagtaaaaaacttgcccgaaatatcttcttaaacattagtctgcttcatggtagcgataaccgaccccgcgcagcgtttcgatatacttaccagcctcacccaacttctgtctcaaggttctcacgtgaacgtctaccgtgcgcgtttccacgtaaaaaccagtctcccagatctgatccatgatttcttcccgggaaaatacagttcccggatgagtaatcaagagctttaggagtccgtattctttcaaagtcaaatcgacctgacggccgttttcgaaaacttcatggcgctttaagagaatcttgatcccgtctttttcgatcttgtcctccttcttgcggttggtccggcgcaaaacagccttgacccgggaaaccatttccatcatcccaaatggcttggttaagtagtcatccgccccggaatccaggttcttgaccttgtcatattctgccgtcttagcactggcgataatcaccggcaagtcctcggtcgcggaagtatacttgagccggtggagaatttcgctgccgtcttcatcaggcagcatcaagtccaaaatcactaaatccggccggttattgtccaggaccttgaaaaaagaatgtccgtcttcaaagccgcggaccttgaagttcattgcttccagcgtgtacatttcgattttgcggatgctttcgtcgtcttccacgcaccaaatttcagtcataaaaaatccccttagcctttcttaaacttatttatagtttaccatttacaagagtgttaaggggtatttcatgggattatctgccagtcttgccggtagttacaaataaggaccatttagcaatattgacggcgtgatcgccgattttttcaaagtacttcgcgaccatcatcaaattgatcaaatattccggattactatccttgttaaagttatcgatcaaaaatgccttcgctttgccaaagtcgtaatcgacctgatcatcgcggtcgattacggctttggccagttctacattctggttggccaaagccgttaccgcgtcgttgaccatacaagtagcaatttgggacatgctcttcaggttcagcatgtcatttgcgtctgagaggggttctttaaggatcagttcggcaatgtccgcgccaatttcaccgattctttcaaggtcgtagaccgccttcaaagatgcactgattatccgcaagtcagtggcaaccggctgctgctccatcaaaaggcgcaggcaggtttcttcaatgtcacgctctgccttgtgaatccggtggtgcaggttaatcgtgtcctctgctttatggtagttgcccgtaaacagggcgtcggttgattcagaaatgctttccttgcacagctggccaatttcttccattgcttcatgcaagtgatccagttccttgtcaaatcttgttctcatttttagcctcctatagccttaaccgaaccggccggtaatgtatttttcagttctttcatccttcggcatggagaagagctggtcagtttcaccgaattcaaccaggtcacccaagaggaagaagccagtcttgtcagagatccgcacggcttgctgcatgttgtgcgtaacgataacgatcgtatagttcttcttcagttccaaagctaattcttcaattttagaggttgaaatcgggtccagggcactggtcggttcgtccatcaacaatacttccggcttgacagccagggcccgggcgatgcagagcctttgctgctgaccgccggacaggcccaaggctgatttcttcagccggtccttcaagtcgtcccagatagctgcttgcttgagggaagtttccacgatttcgtctagttccttcttctcagtaatcccgtgaatccgcgggccgtaggcaacattgtcgtaaacgctcatcgggaacgggtttggtctttgaaagaccatgccgactctttgccgcaggacggtcacatccaggtcaccgttatagatgtcagtgccgtccagcttgatcgagccatcaatccgacagccttcaaccaggtcgttcattctgttaagtgatcgcaaaagagatgatttcccgcagcctgacgggccgatgaaggcagtgacttcgttctttggtatgtgtacattgatgtcatgcaaggcatgaaaatcactgtagtacaggttcagctttttaattgtaattttgtcttccatcattaatttcctccgttattgcgcttgcgcattctgtcagagatacggcgcgtaaccaaagtgaagagcagggccaaaacgaccaggactgctgatgtaaagttggcaatctgagtggctgacgggttcaaggccccttcagttctcatggcccagatgtgcagggacagggtttcaccgcttcggaacgggttcaggggtgaacttggtgagataaccttccagaagttctgccagttgatgtaagttgactggccggaagtatacaaaagcgcagcggcttcaccgaagccgcgcccagcagccatgattaccccggtcaagatctgcggcatggccgccggaatcaagaccttgcggatggtttctgacttggtcgcgcccaggctcagggaaccttccttgtattccaccggcaaggaccggatggcattgttggtttcagtagttatcagaggaatagaaagaattgaaatcgtcaaggcaccggccaagatattccaggacatcccggtccacatgatgaaggccaagtagccaaacaagccgataacgatagatggcagggatgacaaggattcgatactgatttcaaatattgtcaggaacttgccttccttggcatattcagccaggtaaaccccggccccgatgccgattggcactgagaccagcagtgagaggaaaactaagtaaatagtgttgaaaaactggttgaaaatcccgttgccggctgctcccaagaagtcccactggaagcctttcaagccgtcaaagatgattgtcagcattaagtagagcaggaaggccagcataatccagccgatggcgtagaagattcccgtcatcagccggtcttttattttagcacggctcatatttatttttccttctttccattgccaagcttgtgaatcaatataatcaaaacgattgagatgacgaagagcaagagagccattgaccacaaagccagattgtattccccgccctgggccgtgttacccatgtcagcggcaatctcactggtcaggttgctggttggtgacaagagactggtcgcgaaggaccgggtcttaccgataaccatggctacggctaaagcttcaccgatggcccgggccagacccaagaccaccccggtcaagataccgccggaagcggctggcaaaacaaccttgccgatgacttgccagcgggtcgcccctaaaccgtaagccccttctctgtagctattcgggactgacttgatggcgtcagcggcgacagtagtgatcgttgggaaaatcatgatggccagaacaattgaggcggccaggactgagaaaccgcccatctttgggtggaaggcgtttctgattataggaaccagcttggtcaagccaaaccagccgtaaacaacggatgggatgctgacgtagatttcagttgccggccggaagaacttttcgccgatttttggtgaaatttccgtcatgaaaacggctgagccgatcgcgaacggcaggcagatgaacaaacccaacaagcaggtttccagggaaccaacgatgtaaatggcagccccaacttttcccccgaacatgccggtcttgtcaagcggtgcccagtcactggtaaacaggaactcccaaacgctgtggtgcgccttaaggaaggtctggctgccttggtagagcaggaaggcccccataaaaagggtcaaagcaacgatcaagaggccgcaggcgatgtagtccgcgcgccagcgcttgtctttggcaattgctttttgaactactttgtccataatgctttatttctccttcttacttattagcatgggtggctttagcggcagccagcagtttggaggctacgccgtagcccatggcttcgatcttcttgctatattccttgctaagcatctgctgcaagaatgccttggcagcacccttgggctggcccttagtgtacatgtgctcatagctccaaactgtatacttgccattatagacattcttcagggttggcttaacaccgttgattgacacgatgccgacttgcgggtcaccagtcaagtaggacagggaaacgtagccgattgagccggaaacactttggatcatttgaaccaaagtacctgagtcgtcagtttccagagactggtttgactggctagcgtgcttcttcaaagcgtattgctcaaaagttgcccgggtacctgatgaagatggtctggaaaccaggacgatctggcagtcattgccgccaacctgcttccagttggtcaccttgccggtgaaaactttgatcaactgttcagtggtcaggctcttgactccagcatccttgttgatgatcggggcgatggcggtaatggccacttggtggtcaactagcttgctggctgacttcttgtctagcttttcatacgcgaacaagtctgagtccccgatgtcgatggtgccgtcagaaacctgcttcaggccttggcctgacccacccccgttagtgttgatgacactgtccgggttcttgtccatgaaagtcttggccgcgctctgcgctaaaggcagaagggcagatgacccggcgatgttaactgtcccggaaactcccttggtatcggctacgcagctgtcgatgacgcagccggtgacgattgccagcaaaacaagtgcaacgatggcgactttggtttttttgcgtgacatgttaattcctccttgaattcttactgattcaaccttaatggaggcaagttaaatgcattcagtgatgattgttaaatcaatgtaaaatgtttaattttatttaagcccagccgctttcttaacagaattacaaagttttcgcaaggctcccctttacttttcagtttattttgcttaatttatccgttttttacatttgtaaaatatagagctttcactctttacaccttttacatatcgcgcaatattaggatataagtgttcttcttcagtccactcaaagaagcgtttaaccgcaactatataattctggattgtggtcggtttcttgccacttgcctttaaaaattctctgtactgtcttacagtgtcgggatctggatgcgtgatccccttttccctcatgtagataaaccattgcttcaatgaagttcgataagtcctaactgtattaagcgaaccatcaataaatatgacaaacttatcaaaaagatcatccaagttgctatgctgaaaatccaactgctttgagcctatcgaggttaccagttcaccgcttatttttcttattggttttatttctaccatcctaacattcacctactttgttactatgctagcttattacattgttatcttgctatattgctataccagcattgtattcttgtagtatcagattacttcagcataatgttacatttttgtcccctaatatgacttcgaaaacgggcttctaagcttaatatacttgttatatgttcaatttattcataattgttaaaaaagctctgaaaagcgaatttatcatgcattatggacttacaccgctccttatgctgaataccttccaatgttgttgggtagggggggatgcagcaccaatatcaaccaaataaaaaggggctagctctgaagctaacctcattcattaaacattaaaagtaaatttataaataagtcatacttgggtttttatcgctatggtttgggtttaaacacgtgaaattgtgctttatattaataccctgcatctgcaaatattgaccaagcagagcttttaatctgtcctgcgatctattattattgttttggatattcattttatgtataccttcatttttataaattgattgagtggtaactggtcagagttgctgctcattttattttgccaataagtcagccaataaggtggtagaagctgtacttcgtactaacaatattaacgaacatacttagaatatagggttacgggcaatgtcattaagttaaggcattgacttttttacctaaaatcaacttgattagtgggcgtttatttactttgaaagtctatcctaaaacttgacaggagggtttaatttgagcgaagagaatcaaaagaagctgtttggcatctcagcgattatttgcattattttattaacgattacctattttggtgatttagccatcagcaataccttaattaattatcacagctgggtagggacgttttgtcagactttttgcgagtttccggtttatcttatttttgccttatgtggacagattacgatgacttatgcctggaaaggcgactgtgaaaatctgctgggggcaggaccgttgtttgttggcgggcttgcactgtcgctttggcagagcaagaagtatgtcaatgaattcttgggctatctgtattcggtacaaactaaccttaaaaacggtaaggcgatagcaatggccaacagcgactcagtaaagggcggttatgcaggctcaatgattataatggtctggctgttgtttttcgttatatttacgctgttggtacaatggtggctgaaaaacaaaacgactaaacagctgactcgctatatgaaaattgcgattttggcgtcattgacggtttggtttgcattggaagttaatctgaccttaaaagacctgtggggacgctatcgcccatatgaactcacgatcggtaatcatgaatttaccaattggctgacgatcaatggcgttaatgggcataagtcattcccatccgggcatgcgatggcggcaacgttatgcatcgttttttcatggttcgtttcccacaataagcataagatctttttcattggtggcatcgtttatggtgtcgtgatcgctataagtcgagtaatcatgggcgcacatttcctttcggacgttacgttctcgtttttcctgaccgtactgatcatctttatcatgaatggtcttggtaaaaagctaattgaagatttttaaaaattagggctgtgaccatcgaaaggtgaccacagcttttatttatgtgttaaaagtcatgagaatacgccacctttgataaaatttctaatcaaagatagcgtaaagcggtttcaaaaattaagcaaaaaacactcatcaaattctgatgagtgttctaagacgttctccgttcagagtcaatgtcttaacttaatgacattgcttcttacatagtagatccttatttctttagctatttattttttagtcaattgccttagcaactgcactgtttacagcatctttttcgtcttcgattaagttaaccttgccttcgatgaccttaatgtccatcttaatttcacgactaagaagtggaacatttaccttaggttcaaagaattccttgaattccttaagtctttcaggagtatggaagacaccggtagtaactgtgataaatgtagcgaattccatgtcaccaccaacagtcttgtcaagccaatcccagtcttctctgatccagtcccaagctgcttgttgaccataatggttagcaagtaaaccacggtaccaaccacgtaaatcttgtggcttaactacgtcagcattttcaaagtcgctaacaatagccttgatagctgcaagatccttggtgctggttacagcgctgcgtaagtcaaccttgtatgatgggtcagctgttctttggtattccttaattaacttatcaactaattcagcattgccaaagttcttaacttcattgattaaaacgtatggacgaatatctgcattcattgcctctaagttgtcttcattagcagtgaaaatctcatgagctgttttaattgagtctttattttcagcgtaaagactggcacttaattcatatggacgaatttgtgcatcttcatcgctttcacctggcttaactttccagcccaaacgagcaacttgaccagcggataacttgtcataaagcttctttaagtccttttcttgagctgattcaggttcaacaaattggcgcaacttagcagcagtagcgtaaagagcattaataactacacttgacttcgagtcagcaaatttagtcaaaagtggcacaacagcagcataagaaatttgtttaccttctgctaaaagacgtaagtcttgcaataattgcaatttggcaattggatcaagttcatcaacatgagccaaaatatcatcaagcaaagtcttgtcatacttaacgataaagtgcgagttgttacctacattaattctaagtgggtgacctgcttcactacgtaaattcttgtagtaacctaagtcgatttccttatcagacataatcttaggtgccttgaagttagcattcaacggaatttgccattgtctaccaacgtctttaccttcaccaacgaagaattgttgttgtgaaagctttaagtgaccatcgctactatcaacatatgcactaactactggataacctggttgctttaaccatgagtgcataatcttgccaatatcaaggtcagttgcggttgaaagagcatcccaaagatcgtcaccagtggcattaccgaacttgtggtggtcgaagtaatacttcaagccttttcttaaggcatcgtcaccaagaagtgaacgaaccataactagcattctagaacccttagcataaacaatggcactgtcaaaggcagagtcaatatctgctggatcattgatttccatttgaattggttgaacaccgtcagtagcatctctagtcaaagctgcaggtgcttcactggtttggaacatttcccaaatatgccaatcaggttctagaccatcaactgacaagtattccatcatgttagcaaaactttcgttaagccataaattatcccaccatttcatggttactaaatcaccgaaccattggtgagccaattcgtgagtaataactgtagcaaccaatttcttcatttcaaggctagtattgtctggatcaagcaataaatatgcttcacggtaagttactaacccccagttttccatggcaccagcactgaaatctggcaaagccagttgcaatgattgtggaagtgggtatttagtttggtaaaattcttcgtaaaactcaattgcattcttagcaacatccaaagcaaagtctaattccttaggtttgtgtgctttggttgcgtaaacaccaattaaaacgccatccttggtatgggtagtctttgattgcaaatcaccaaaggcaaaggcaaccaagtaactagacatgcgaacagtttcttcaaagtggtggtagccgtccttgtccacttcaacttcaggcatattggcaagagcaacttcgccatcttcttcatcccacttaagggctaaagtaaaggtagccttagcttctggttcatcgatacatgggaatgcttgacgagcaaaagtggtttcaaattgagtaccgataatttgcttcttgacaccatcaacttcgtaatatgaaggataaatacccatcattgtatcagtaagtggtgcactgtattctacttcgataatcgccttaccgtttttgccagtttcaattttaatggcttcgtctttttccaatacatcaaaaggaacatccttgccatcaaccttaacgctatcaatggtcatgttcttttgattaatgaaaacaggattttcgattacttcaccagtaacagttgaagtaccattaatttccttttgcttacggtttacgttaatacgtaaatcataatgttctgggtggaaagtttcataaaaacgtttaactgccatatttttcctcctaattaatagatcatttacttttaattttaccaaaataagcgcgaaagcgctcaaaaaaggctatttcttgttgattgtaaggatgacgtttcagttctgtaacattgctgtcatattgagcttgtactatagaagcatagtcattaagaaataaataagttttgaaagaattaattaaatttaataaggaatgaatacatcaatgaataaacatgttaaatctactttagtaaaaatcttagctgccttagcacttgcctttgcttgtgttgcagttgcaaatgctttttctaccaatacttcaactactcaaactgttcaagctgcaagaaagctttcaaaagctgaaaaagctgctaagagatggatcgcaatgcgcgaatcaggtggtagctacactgctagaaacggtgtttgttacggcaaataccaattaaacattggctacttacatggtaacctttcacctaagaaccaagaacgtgttgctgataattacgtttacggtcgttacggttcatgggttaacgccaagagattttggttagctcacaactggtactaaaattaaattcctttaattcccaaaagctaaagaaaaccagcttagtccaattgactaaactggtttttgttttactcaaaattatcttgcttgataaaacgataaagtgcaatgactaaaactaagatcgagcacgccatccctacataggccattgttccaatgtggacagcattgttagcagcttcacgggctacttgattttccattgcatagcccacaacccatttacgcattaataccggcgtcaagacaaaactaactgtactaataattgaagtcactaacgctacattacgcgaatatggttctttaaagaactgtgctaatacgcagaatgctggagcaatcatcaatagcaagatccacataataatccagcgcccagaacttgaattcatcatctgcgcactattagtggcataacgatatgagctccaaagcgatccaccagataaggtattaagcaaactcaagaaataagatccacgttgtccataaacaccaccattattggacagaataccttgaacaagttggaaagtatcagttgatccagccgatgaaaaatcgaccgacacaacttgcttcatataagtagctaaaaacatggtaactgagccacctaattctagtgctcttaacatgcttaattttcttgaagctttcagatgaaattccagacttaaaactcgatcaggatggtgactgtgaccaatgataaaaatccctgcaatgacgatcaaggctaagataaccaatccccaccagaatttaatcatggcgaaaaataaggctaaaacaataatcgcaaccgaaatatatggtcggtcagaaaaaatattccaaaagttcaacttaacatgatggtaatttttccttgatgcatttgcgacattttgattaataatcggctgaggattactaatttttctgctgcgaaattcttcacgtgttgttgctcttgtcttagtataatcggtccgtgaacgatctgcgccggcttggccgtgctcttttttcatgcgatattcacgccgcgacatatgtgccataaactgcagcccccttctcaaagcactatagtagcacattatcacttttttgcttgaattaagaatgaaatttcaaagaaaatttagctttgttttgcatgtgctaaaatgaatattaataattgtgctttttttagaaagagataactttttgaataaaactaaatcagcaaaactgccagctggttggcatatggccttttataccttatggctcggttgctttatcactgggatgggctattcaatgacaatgccctttatttcactatttatttcagatttgggtaattattctaaactgcaaatcaatctttattcaggattagcttttgcaatgacttttattgcccaggcaatagtttcaccatattggggcagcctcgctgaccgcaaaggtagaaaactaatgtgtatgcgtgcttctggtgtgatggctttaactattaccctaactggatttgcacccaatgcaatttatattattgtaatgcgttttattcaaggttctttttctggttatattaacaacgccaccgctttaatggcaagtgaaacgccgcatgaacgtagcggctgggtcatgagtcaaatgatgacggccgggactgccggaaatttggttggaccgctattaggtggtgctctctccagcttctttggcaatatgtttggtggcgcctgggggtatcggattccattcttcattaccggtgttttaatgttcatcgtctttttaggtacaacgttcttagttcacgaagactttactccaatttctcgtgaaaagatgaagccgatgggcgaaatcatgaaaagtttgcctagcgtgaaattgattgtggtgatgtttattactaccatgttggtacaatcatcaaccatgtcaattgatccaattgtttcattatacgtaaaatcaatgatgcctcatggcggggatgttgcctttgttgcaggtgttgttgcggcaacgcctggtcttggaacgctaattgcggcatcgcgaattggacacaagatggatgaagttggaccgttacgcgtattgcgaatcggcttagtcgtcggtgccgcattgtttgtaccaatggctttgactaattcgccttgggtactagcaggactgcgcttcttattagggattgctagtgcagggatgttgccagccgcacagacggtattaactttaaacacaccaagcgaaagtttcggtcgaatctttagttataaccagtcatttcaagcagttggtgccgtgttaggatcgttaatgggatcgactatttccggtttttcaaattatgcaacggtattctggctaactggatttacgttactgatcaactttgtgcttgttttgatttttgcttggggaatttcttatcggaatagataggttaagcatattcctaaagtatggaatttaaaaatgtaataaaagagctgtaaatatcacaaaaaaatatttacagctctttattattttcaattttttacgctaccatcttttcataaatgcgatacatccgattatcataagcgcacattgaaataaccagattatagcccgcgttttctttctgccacttttcaatcgcgtcaactgcgatcttagttgcatcttctgcaggatagccatacacacccgtagaaatagctgaaaaaattacgctatgcaatcccgctttctttgccaaagccagtgaattatagtagcaagaagcaagcatatgtgcatcactagtcttgccagcataaactgggcctactgtatgaattacatatttcgcaggtaaattatagccatgtgttatccttgcttcacctgttggacaaccatgcagcgccatacattcttcaagcaaacgtggaccagctgctctatggattgcaccatcaacaccgccaccaccaagtaatgaattattagccgcattaacgatagcgtcggctttcatcttagtaatatcgcctttaataatttttatatttttcataatcatgtcctcagaaatacccaacatttctttccacccccattctaacaccaacaacatcagttaggctcagaaagaatacaaagcatattgttatttttatattacgaacttgaattgatttctatctttagtatcctaatattaagtttagcgttataggagcaacgaaatgaaaattctacgacgcagtttatgcatcatttcgatcaccttattttcttttgctttgagcattctcattcctagtgttcaagctagcaaaacagttttagatgatctcatcatatttttatatttaattggaatcgtaattctgggcattctgttgttgtctaacaaatttgattacctatcactcagtctaagcataatcttgctactcgcaactatcattgcttggatcagattcccaatgattagcattatttatactttttttatcgcttatctaatcatgtgcttactaactattttcattgccaaaaggattaagaaataaatttatgttttctaaaaaagaactaaaaatcatcaatactacattaatcatcatatatctgctttcagttggcccaacattcatcttcggttttactaaatcaaatgatttcacaagtactttctttttaattgcaaatatcattttagtttgtttattcattatcattgctatcagaattgctaaaatcaatttcaggctaaagacacaatattatctactaggcttcatcactcttatttcaataatagaactagcctaccctggactgacattaaatgagcgcattagcaattattttgctatcggcaatattattctaagcttgctaactactaaaatctcaaagaaattagtttaaatataggacacaaaatgaaatatctgaaaattccaagattaattaacagtattttgattactttacgtcatactgctataaattattgaattcttattactttaaaactacatcaggtattttcaatcattcaataaaaaataagactagcactaagccagtcttattttctattaatcaactattctttgggtgagaattgccatactgttccatcttggctacggtatgagccatcactcatctttgtaaatataaagacaacttttttcgtcctaattgtgtaaccgttttttgattcagttgtatcaactcggcccaaatcagccttaacacctgtttggggtggattatttttcttagtagaatatgcttgtaaaatttctttattaagtttagtcttcttttgctcagagttgttactatttttagcaactaaaatagcatgattctttgtaaaatacagatcaaaccaattacttaagcgattttctgtgttgtctactgttaatgttcgattaacccagtttttaggtaccgttgtttgattattgtagaaaaacattccaccaataactgctacaagtactgtaactactgcaattacggataacgtcattttctttttcataatacgtttcctcttaaattcagcattaattatttggcactaagcctctcgaaataagtcttacatttcctgaatacatgctaacccatcggtttctatttgttttaaaattgtgatccatccaggtactgtttctatacaaatagccactgtaggcaccatcattataataaaccttagacggagttgtattaagtaaattcatagcatcccctttaccccaactactatatctataaacattagatacatacttgtgaagtggagcatttttgatcggtccatagactttgactcccttagtttcttgaaccgtagtttctgatgcttgaacacgttgattatttgtagccaagactgtagctgcagttacacctaaaagtgtagcagttgtcaataatacttttttcatttttatttctcctcgttttgttctaattttaataatacttttttgcgagccgaagctggtgcaggaatgttcttaacatcataactgtatagataccgtctatacagagtagtagcactttttcctactttttcacgcataacttttgaaagatatcctctatatccgttgtattcaaagtaatgagtgggaccataatcgcaacttgaacctaaagtgatccaaattctcttaggcttatagtaatctgctcttaattctgaacttacagttgattgtgtttcagttgatgcatcaactttgcttgaaaatgtaagtaaagttgtaccaactaatcctactaatgacaatgaaactagctttcttgaaattgatttcatttttatacctccgtaattatcaaatgacttatacaaattatctattctctttttctcccatcctttcaacacctggcttgacatttaatttaggtatttcaaaagtatctatactgcctaaaatgacaaaagccgttataattgtaagcgtaagtttgtttctttttcttttcatcattgaggtaatctttatgtacggtaaaaaatttaaagaaatcagaattaagcagaatatatcattagaacaagcagcaaaagatgttgtttcaatttcaactttatcacgctgggaaaatgataaattagacatcaatttttctcaactaaaccacttactcgcaaatatccatttaacattaagagaatttgctagatattgtgaaattaatccatccgatactttctcaattaaagctgcaaaagcatataattcagatgatattaatcagttgcatgcccttgctcaacaacaattagataaatactatagttccagagatagatacgatctatttttaacagcaattgctaataattattattttgacctgactcaaaaaaatattttctcgcaagaagatataaatcgattaaattatctattctctcatgttgaatattggtcagaattttacataacagtttttgcaaataccgtttttctgattaagccagaagttcaatatcaaatatgcaataaaatcttaagccagctatatttacaagatttttctagctgggatatttttattgattctattggttcaatattaaattcactaactagtttgattattagcaatcctagcctagcccaaaagctgttagaaaaaatcaataaattaccaattcctattcaatgcagctatatgaaaattagaagaaactttttagataaattacttcattatcgattaaataaagataacgaaaatgaaatcttaaacattatttcttcacttaagactcttggcctacctcagattgctcacaacttttctacactttttactcgtattaaagacttgtaatcatctccttcttatttttatgtttttataatactctcatatctatttcagcttcaatacttttgcagatttgcaaaacgaatttaaactccatacaaaaacgccttgcccgaaagcaaagcgttttttagcataagcaatttttgattaacccttatctgcacctgcagtaattccgttaacgtagaatttctgcatgaagacaaacaagatagtaattgggatagcgatgattacacacccggcaacaaattgtgcgaagtatgcagtcgcgttacctttagctgtgtgcaccatgttatacaaaccataagcaactgtataagtcttagcatttcctgaagttgaaagaataatacctgagaaaatgaagtctgtccatggagcgatgaaggcagtcaaagcagtataaacaatcattggctttgaaagtggcaaaccaatatgtaagaatacttgccacttagtagcaccgtcaatttcagcagcttcgtcgattgaccgaggaatagtatcaaagaatcctttagcaacgtagaagcccaaaccggcaccaccaacataaactagtaacaatccgaagaggtttaacatgttaagacccttcaagatgtagtacaaagcaatcattgacatgaagcctgggaacatccccaataccaatgcgatctgtaagaatggctttctaaatgcaaagcgaagtcgtgataaaacgtaagcaactgaaatagtcaaaaacgttgaaattaccattgaaagcaatgaaataactaaagtattaatgatccagttaccaaatggatattgtggattagtaaaaatcccaatatagttctgcaatgtgaatttttccggccagaaggtcgaaacgaatccagtatcattgaatgaaaaacttgctaagacgatccagacaatcggtaaaatccaaagaatcgctaaaacaattaataagatataccgaaagattaatgagagccgtctttgatttgaatatgacttcatgtctagccctccttaaatgcattagtacgacgatatgcaatcaacgaaacggttgcactaataataaagatcaagatacccaatacggcactggcgttataacgctgttcctgaccgaaggtcaagttatataaccacgttaccaacaagtcggtcgatccggcgccgttatacttactgttcatcggtgcaccacccgtcagtaagaagataacgttgaagttgttgatgttaccaataaattgttggataagtgaaggtgccattacaaatagaatttgtgggaaagtgattgaacggaaaatttgtgcggcattggcaccgtcaatcttagcagcttcaatttgatcttgtggcaagttttgaataatcgctgttgaaaccaacatagaaactggaataccgatccacatgttaacaagaataacggtaattcttgcaactaaaggtgaagcttggttatcaataaagtgaattggtgaactaatccaatgcaagttcatcaagatattgttcaaagcaccttggtagtccaagaactgcgccatcatcaaaagtgaaacgaattgtggtacagcccaaatgataacaaagattgttctccagaatcccttgtgcttgattccttttgattcaatcagaagagcgagcaaaacaccaaagaagaaagtcgtagcagtagctgccacagcccagatcaaagtccagcctaagactgggaagaaagtaccagctaagtcaccactcaaaacatttccaaatgcttggaaacctgtccacgagaaagcgattgggtgttgacgatcatagttggtaaaggccattgaaatcatgaagatcgttggcaaaatcgtaaagaacaagatacccaataatggaataaccatcaaggttgcgtgtaaccgagtatcaagcaaactcttaagttcttcaacgttagttggaatatggtccccatcacgcttcaaaatataattatgtctagttgagcgtaagttgacaatgtataggtaaatgattgctacacataagatcaaggccaatacaccgaataacaaaatcaaaactgagtttgatggttgcttggttacataaacgccttgtgcggcatcataaacaacttttttggttttaatagtacctaatgtagctaatgaatttaaagtagggataccactgaggataaaccaaacaataaagataatttctgaaagtaagagtgaaataccttttacccattgtttgtttgccaaggcgttactacccattaagaagaatgataacttggtagcaatgtcaccttttgaccaaacctcgcgatatgttgctttaggagctacatgctttttctttagaaacataacttctccccttcttaggcaaaaaggctggacaatttttatttagcccaacccttgcttatgcttttagcaaattatttcttttcaatgttcttagcgagcttagcaagttgtggcttgtattgtgctggcttaatcttgccgtcgtaagtaccactgataagtggagctgcaccattccagaatgcggccatttgtggaagcttaggttgcaatactgagttacctggcttagccatttcgattacagcttcagcaaccgggtcactcttaacagcacttgagttgacagcgctcttcaatactggaatttgaccagcgttcttatgagcaattaattgtgacttcttgttagtaatgtaagcagctaaatctgaagcagccttagcattcttggtgttagcattaactgcgaagccttcaataccaaggaatgcttccatttgtacgctcttaccaccaacttcaatcttaggatacttagcaactgcgaagttcttacccaagatcttcttgatattagcagcgttccaaggaccgtccaaaatagcttgtgcgttacccttcttcaattggttcaaagcgtttgaagtttgcattacacccttgttcttcttttgagctgcgtaccacttcaaagcattaacaccgttttgtgagttgaaagttgagcccttaaggtcttcaccattcttaccgtaaagtgtagtacctgctgagaacattactggccacattacgtaagcgttagtaaagtcggtagctacaacaccctttgaagttaaagtcttccagtccttaacgtcgttagctgataacttagacttgttgtagtaaatggtttgagcttgttgtgcgtatgggaatgcgtaaaccttgcccttccaagttacaccctttgaagcaacatcgacatagttgtcttggatatccttagttgctgatggtgaaagtgggttaatgtaaccagcttcagccatttgacctaattgatcgttaggaacttcaaagacatcagcagcctttgatgggtccttaccaacgtctgtcttagcgttagctgaaccgttaggactttgaactacacgaaccttaatattcttgttcttcttagtaaagtccttagcaatttgcttgtagtaaggaacttgttcagtatccacccaaagagtcaagttagccttcttgtttgaattactgctacttgatgatgaattacttgagccgtttgaacatgctgctaatgataatgcagcaagaacagcagtactacctaaagccattttcttccaaatcttcatgactttttcctcctaaaaaatcaaaacaataaacaattcttaacaacagtagcttctgctacatatggttgtaagcttaattaatcaaatttgtactgcgttttcagtacaagagttagttcacaattgccttggtagaatccttgtcaaagaagtgagctttgttaacatcaaagcccatcttgaccttgtcacctggcttgtgataatcacgtgaatttacaatagcagtaaattcagtaccatcaacttcttggtgaatctgaatagttgcacccaaaagttctgaaacaacaacatttgattcaattactgaatctggccaggtttccataaatgcttcttctgagtgaatgtcttctggacgaataccaaagactaagtctttgtcgttgtagcctttttcttccagcagttttgccttaccttcaggaataccaatattcaagcctttgccatcagaaattcgaccgtccttgtagtgaacattgaagaaattcatttgtggggaaccaataaatccggcaacgaacatattaactggcttgttgtaaacttcaagtggtgagccgatttgttcaactctaccaacagacattacaacaactctatcagccaaagtcatcgcttcagtctgatcgtgggtaacataaatagttgtagtacccaagtcttggtgaagtttagcaatttcagtacgcattaccacacgcaatttagcatccaagtttgataaaggttcatccatcaagaagataggtgccgcacgaacgattgcccgtcctaatgcaacacgctgtctttgaccaccggacaaagcacctggcttcttatccaagtactcttcaaggcctaacatcttagctgcttttttaaccttttgatcaatttcatctttaggcgtgtgacgcaactttaaaccgaaggccatgttgtcataaatggtcatgtgtggatacaaagcgtagttctggaaaaccatcgcaatgtgtctatcctttggagcaacatcattcattactttatgatcgatttccaaagtacccttactgatgtcttccaaaccagcaaccattctcaatgtagttgacttaccacagccagatggaccaacgaaaacgatgaattccttatccttgatatgtaagtcaaagtcgttaacagaatatctgtcgttacctgcatattttttgtaaatatggtttaaatcaacctcaaccattgtttcccctactctctttaattatttttcattaaaaactttttcaatttcactcaatttcaactcagcagttgttggaacgatgtaatcagcttctttcaaaagctccttatcaccaattcctacggcaaattgacctgcagccttgattgcttcgaccccagctttggcatcttcaaaactgattacttcatcagcctttaaccctgcaatttcttgcgctttgatgtaaatttcaggatctggcttaccatgatgaagtgttgctggatcaacaatgccatcaaattcatccataatacctaatctagttaaaatcttaggagcattcttagaagcagaagcaattaccatctttaagttttgcttcttagcatctgccaataactcagggatcccaggcaaaatgtcctttggcgtcattgtttctacttgttcaacaaatttagcgttcttttcagctgcgaacttttctttttctgcttcagtgtatttgtcttcttgaccaccgtacttcaagatcaggttaagtgaatccattcttgaaataccacgcaagctatcaagttgagcatctgttaaggtaatgcctaattccttagctaaattgttccaagctgtaaggtgaaacttagctgagttagttaaaacaccatctaaatcgaataacaatcctttaagcatttgtagtttcaccttctttaagagtaactttcttatcgtgaactaatacatcaatatcttcacccttaagcaaagtaagcttagttccttcatgatcaacataaacttcgatcaagcgaccacggtagttgatcttgaagctgtagtgatcccaaccttcaggaacaaatggattaaacttcaattggttgtgatcgtaacgcatgcctgcgaaaccttgaacaattgtaagccatgaaccactcattgaagtgatgtgcaaaccatcaacggtgtcgttgttgtagttatcaaggtcaagacgagcagttctttggtaaagctcaacagccttcttttgcttgccaagttcagcagctaagattgagtgaatacatggtgaaagtgaactttcgtgaactgttaatggttcgtagaagtcgaagttcttttccttttgttccatagtgtattcatcgttcaagaagtagataccttgtaaaacatcggcttgcttgatgaatggtgatctcaagatcttgtcccatgaccagtgttggttaattggacgttgatctttgatttcgctaactggacgaatatccttgtctaggaagtcatcttgttgtaagaagatgcctcgttccttgtcttctggtaagtacatgttatctacgatgtcttgccatttagccttttcttcgtcagttacgcgaactctttcttgagcttccttagtagcaagtggcaaacgttccaaagtgtatttgagaagccatcttgccatggtgttggtgaaccagttgttgtttacgttgttttcgtattcattaggacccgttacaccgtgcattacgtacttgttacgccactttgaccagtgaactctagctgcccagaatcttgcggtaccaactaaaacgtccataccttcgttcttaacgtagctgtcgtcgccagtgtaatcagtgtacatagcgattgcgtgaggaatgtccgcatttctgtgaatttcttcaaaggtgatttcccattcattgtgacattcaatcccgttgaaggtaaccattgggaacaatgcacctggtaagccttgttctttagcgttatggtatgcgcctggcaattgatcgtgacggtattgtaaaagtgcccgagtaacactaggatcagtaacacataagtacattggaacaatgtaggcttcagtatcccagtaagtagcaccaccgtatttttcaccggtaaaacctttaggaccaacgttaagacgttcatcttcaccgtaataagtcatgaataattgacaaatgttaaagcggataccttgttgagcggcatcatcaccagcaattacaacatctgatttgtcccagcgcttttgccaaacggcttcatgatcagctaagttttcttcaaaactcttagcttgaagcttggtcatcaattcagctgccttagcatcttgatcatctggtttgacgtcacgactagtaacaacaatgacatctttttcaagatcgtagctttcgccttcatttaactcaactgaaagcttttcatgaagttgggctgcttcagttgaaacatcacccttaactacttcaccattatgacgaagactttgcttaaggaggactgtaaattgtggaaccttgtatgggttagccttagtttcaaccttaatagttcttgcttcagcattttcacctaaaggcatccagaattttgcatcgtagttactgtcttcgttaacaacagttccatcaagtgctgcatcaaagtcgatcttagctttaccacttaaaacggtagccttaactttaattaaagctgcttcttttaaggtaatatgtaaaaacctttcgaattcgaatttaaccttagtatccttaccttcataagtaaaacttctagtcagaagaccttggtgcatatcaagtgctaagtagaaatcactaaacttaactttagctaagtcaagtttttcaccattaatcgtaattcccatgttgatgaaacttggtgagttaggaaccttaccaaagtactttggatatccgttcttccaccaaccaacacgcgtcttatcagggaaccaaacaccagcaaggtaagtaccttgtaagctgtcacctgaatagccttcttcaaagtttcctctcatacccatgtaatcgttgccgattgcagtcatactttcttgcaatcttttatcttttggttcgaacttatgggtaacgaccttccaaggatcaatttcaaaaattcgtttcatatattctatctcccgtaatattcgaggttctctcttgtttacgctttcattatcctttagttgaaagcggtttacaatattaaatctgctgttaccgttatcaggattagttaatagaaaaagaaggtagatcttaatctgccttctttttttgcttattaaaagtaacttttaatgaacactcactacaaagccttttggtgccaattgattattctcataatcttgactaaacgtgttctcacaattgatctctactggatgatcggtcgtgttaaagtatgctttaatgctttcattcccctcacgatcgacctcaattaacccattctctgttacgtgtaacttaattcgacctttaccgaaagtttcatcatgttgcaaacgaaagtcaatcaattgatgaactcgttgccaaaccggaccgtcttcttttgcccaatccattggtttacgacaatcaggatcgttgccaccagtcatacccatttcagttccataataaatgcatggactacccttttgcataaattcaaaagctaaggcttgcaaagccaaatcttggtctccattagctactgtcaaaattcgggctgtatcgtgtgaatcaagcatgttcatcatggctgcattggtagcatcgcgatatttcatcaactggtctgtcaaacgactagttaattcttgtgctgacagcttatgcttgaaaaagtgatcttcaatctgcaatgtatatggataattcattacgccagtaaactcatcaccgttaagccatggacgagctgagtgccaaacttcacctacaatataaaagtctgacttgatatcagtaacagccttgtggaatttcttccagaagtggtgatcaacttcgttagccacatctagccgccaagcatcaatatcaaagtattttacccagtaagtagcaatctctaacaagaaatcctgtacttctggattagctgtattcaactttggcatatgcttttcaaaggcaaaagtatcgaacttaggactaccctcaccctttaatggatcgcggtaaggttcaactggatattcattaatgtggaaccaactagcaaaacgagaacttggaccatttttaacaacatcttgccattgcattgattgatcacccaggtggttgaaaaccgcgtccagcatgaccttcattccgcgggcatgagcttcattaacaactttcgcaaataaatccttgtcgccgaatgccggatcaacttgcaaatagtcaatcgtatcatatttatggttagaactggctttaaaaataggacagaaataaaggccattaacacccagtttcttcaagtaatctagatggtcaagcacgccttgcaggtcaccaccatagaagtcttcgcggccaggatgatcctccggattccacgctttaaccccttggggatcattagacttatcaccgtttgcaaaacgttctggaaagatttggtaccaaacagtatgcttaacccattctggcgttttcaccatatcaatttcatggcaatatggcactttgaaataagaaccatcttccataatggccttgtctacatcactgctaattgcacgatcaccgacaactacactagtgccatcactgccaattacttcaaaggtatacttcaagcgatgatatggtgcttcaagcgtaatgccccaatgatcttcacactgccctacgccaattttttccatctcacatgttttagcctgttcaagtggcaaataattatcgcagtaatgaacaattacttttttaacgtcatttttagcactgtgaaaacgcacgcgaacatgacttggatcaactacaaaactatcttcactttcagttcggtgtcttaaagctgctaattgcatatattaattctcctttttcaacacaacacctgcataaggcatcaaagttaatttttcattagttaattgatattctcccgcttttagtgttgcaacagtataaccggctggtatttcaacagttgtcttttgatcactcaatgaaacagctacaatggcactttcatcatgtaaatcacgttgataaacatagctattcttatccgttgaaatcatataatacgttccaatctggaataaggcttcttttttgagttccagcagttctttgtaaaaattaaacatgctggtggtatcgttaatctcattagctacgcaagcatcatcctgtttaatacctgttatccatggtttaacttcactaaaaccatggttctcagttgcatcccacggcattggaccacgggccggcaatttatgtgtttcactaaccatagctaaggccgcatctttgctcaaaactttttctgcatcctttaaccatggcgctacagtttgatcttcgaattgatctgcactagtgaaatgtagattctttaaccctaattcttcaccgtaataaattactggaattccgcgttgcaaatacatcaacatcgccaagctcttagcctgagtctgtgttctagctacgcgtgtagccaaacgggccatatcatgattattccaataaagagtaggctgcgatacgcctgctaatgtttgttgccaaaccacttgattttgtttaaaggccgtcaagtctaactttttaggctgatattgctttgaaaaacgctgatcacaattagaatcatcatcggtaaagtaccggaaggtaattacactatccattaggtgattacgcttagtcgtgtaatcaacagctagattgacactagcacttgcagcttcacctaataaaagcgtatctggataatcctgcttaatctgctcacagaaaggccgcatccattcctgcacctgtggtaagttagcgaaaaatggttccgcaacaattggcttgttcacgtccccatctccagttggataattttgtcgcaaatctgccttgccaatatggataaaagcgtctaaacgcaaaccatcaattccttttttcagccaatactctgccacttccaacatagcatgccgaacttcgggatttttccaattcaaatcaggcatccgtttatcaaacaagtgaaagtaagattgacctgtgcctgctggatctggctcccatacactgccaccaaagaatgaaccccagttattaggtcgcttgccatcatgaccagcgaaaatatagtagtctcgataaaggctatcggggttcttgatggcatcttggaaccaaggatgttgatcagatgtatgattcaagacaaagtccatgatgaggtggatccctgccttatgcaaatccttgattaagttttccatatcttccatggtccccatatgaggatcgattgcgaagtagtttgaaacatcatagccgttgtctacttgtggtgaaacaaacacaggattaagccagacggcgttaactcctaaatttttcaaataagggatgcgtttgcgaataccattaaggtcaccaacgccatcgccattgctatcttgaaaagacttaggataaatttgatatataattgcgtgatcgtaccaatgtgccataattaatttcctccacgcatagtttaagggaaattagaaaccgttttcaacatcatatttattgttagcggtatcaaaaaagcacaactcaaatttgaattgtgctctttgcttacttctttttaaatatcatgttccaaacattccgccacttgctgcctttctcctgcaaatcagccactggctgcgttacctcaatacagccaagatacgcgtggtgctagttaaatcgttctaggcaatatgccatattataagctaaaatggctatttctagccgctgctgaaagccagctaagctccttgctcggttattttcagcgttatagtaactgagcaaagaaaagtcgctttcaattgttcttctaattgccatcagttgatgattattatgttttttagcacctttcatgttttttcgatatggtgtccaaaggacatagcccataccttttaactcggcagctaagtcttttcctaagtagccttcatcgcctaaaagataatggttaattggatgagcattaatcatcaattctactgtttctttggcatcatgcactgatgctttagtgactgcgtagtcaagcaaatagccttcatcgcttactagcgcgtgcaccttgaaaccataataatagactttcttggttgctttatagccaatatcggctatgtcacggaagatcttaacacgataattacgaacaggctgacaaactggaacaggaaaactgtcaataattaaaaattctccagcaacctttacctcttgattccaagcttgacggatgcagcgaattaaaggcaaaagcatcttggctcgacgattaaagcgagaatgagataagccaacaaaaaatttacagaatcttctttgggattcaattccaatttcagtttgccaaatgagcatcgctaagatggagctgtcggaaagctttgtttgatcaatgttttttcgatgcgtaagcttatcaggcgcataaagattatatagtgaacgacaaattacatttaaacgactaaaactaacttgtaaatggtgagagaaacgattaagcttgaggtagttcaattagatcagactcttttctatttaatttacttacaacttgagtctaatccgattggacttttttattaactaaaacgatttaactagcaccacgcgtagccaagatattttccttgatcattatgcaaactataaaaggcaatgttcaccggaatcccatctttatgaatcataatcgacaatttaccacgtttgccttcgtgcatctgctttaaaactgccttaacatgaccttgactgtgaccgggatgaacttcaaagacagttttgccgatatctttttcagttcgcttaaataagcgatgtttattcatcgatgaccaaacaaccacatcgttttcatctaggacatccatttcctgaggaatagtctcaaagatagcatttaactgttcgacacttaaactgccgcctattaattcgattttatctgtcatttactttgctaaccttataacttcacgggcaatcatcaattcttcgttggttggtacaatcaatgcttttacttttgaatcaggcttagaaataaatttttcaccgtctgttcgattagccttatagtctggctctaagccaaggtagtggagtgccgacattacaccggcacgaacacctggatcatgttcaccaatacctgctgtaaatacaatgccatcaataccatccatctctgctgcatatgcaccaacataacgtacgacacgatttacgaaaatctttcttgctaatctagcatgctttttcttacttgccaacagatcacgcatatcagaggaaacacctgatacgccaagcatccctgacttatgatttaacatgtctactgcttcttctactgtcatactggtcttttgcataatatactcaagagcagatgggtcaaaatcaccactacgtgttcccattgctaccccagttaatggactaaagcccattgaagtatcaagtgatttgccgtttttaaccgctgtaactgatgcaccagaacctaaatggcaaacaatcaacttaagcgtatataagtttcttcccattagtcgagcagtacgtggagctacgtagcttactgaaataccatgtgcaccatattttctgatcccatatttctcataatacttataaggaattggataaagataattaacctgatcaagactagtatgatatgaagtatcaaacactgctacttgtggcacatccgggataatcttcataaatgccttaattcccatggcttctggcacattatgcaatggtgctaattcacccaagtcaaaaatttgttgaagctttttttcatcaattaaggcagactccctaaaaactttgcccccattaactactctatgacctacgcctgctagttcatccagactttttaatacgtgaaacttctttaaattttcaattaataagctaacagctgcttcctggtctggaatcgaagtatttttaatatattctttgccattcaacttaattttgaaaacagcattgtccattcctacacgatcagccatccctgaagcgataaccttttcgtctgggaataaaaaaagcttatatttaaatgatgaactaccagaatttattgccaaaacttttttcataatcgtgacctctattcatattttatctcttatttttagtatagcgctttcacctataatagaaaataattttaaaagcagttaaaaagcacctctgagttatcagacgtgctcgttattttttcgatttatctagttgattggcgccgaattagcttaggtttgagcattacttcaccttgaggtgaacccgattgggcaatcttttgcagtagcattttagctaacatttcacccatttcaaaaattggttgtttaattgttgttagctttggattagaaacttgatctaaaaagacaccatcaaaaccaataactccaaagtctttcggaattcgagcgccttcatcttgcaattgccgtacaacacccactgcaattcgatcactggcacagacgaaacaagtatcttttttaaattccttaaaatgttcatgaatcacatcttgcgcagcatgactatgattagaaacccgaaaaatttgtggtatcaactggtgttgttgcaaagtgttgatataaccagcttcacgtgaatattcaaatggctcttttaaatcaattccaataaagacaatgtgcttatataaccggtctaaagcatattgagtagccatcttctctgctaactgattatcagaatcaacaaagtcatagccgcggtgattttcaccaaataaaacaaaaggcttatcgagtttatcaaataattcataatctttgtttcgcgccccggtaattaaatagccatctgcatgttccttttcaatttgattaggatccgtaactaattgcatcgcatactgcttagtatttaaaccacgagcaaaaccaaaaagcaagttcatatagtatggctcagtggtatcaatatcttctaaagtgacgaattttaccacgttagtccgattattaactaaagcctgtgcaattgaattgggatggtagtttagtttctccattgctttttctaccattgctcttaattctggcgttacttgctcaggatgattaatcactcttgataccgtcatttttgatacatttgcttctttagcaacatctgataaagtagtcatattattcctattctaagtacatctttctgaatcggtttaaatctttttggctaaagccaagctcttttttgaaaaatccatcaaaactgccccagccttggcgaatagtttccgtaattccacgaatagccggtccctctcccttggtaatattcattttagaaactaggctagcaatttcattatcatcggggaactgtttagccaaagcaaagtcatacaattcattggtcaataaataatcacgcgaaatggtgtcatcatcaacacctaatgcagttaagatcagtgctgaagtcattccagttctatctttgcctgcactacaatgataaactagcgcatcttcttcaggtaattcaatcaattccgcaaaaattttagcaaattcatgttgactatgtgaattaagcaaaacctgctggtaaatttgaccaagccaattgtcacccatatcaggaatatgatggacaaagcgatataacttgttatcgcctttattttgcttgcggttttcagaataaatatgtgcatcaacaaaacggacatttgaccaaagcttgtcaggcgctgaattttgttcatacttagagcgtaaatcaacatctacggtaattcggcgttcaactaacttttcttgatcttccttcgacaaggagctaagtgaatcagaacgatatattttgttccactttacatgttgacccttgtcattttggtagccgccgatgtctctgaaattcagcggtcgatccaaagctaatattcgatcatgcttcatttttccttgcctttcctcattaaagtgttaataccgtacttttattatatcattatcagtcatgtgcaaataaccgagcagcacgaattgcacgttgccaacctgaataaagtttttcacgttcaactgcactcattttcggctcaaaggcctgtccaatcgtaaaggtatgctttaactcgtcaatatttttccaatagccaacggcaaggccagctaaaaaggctgcacccatgctggttgtttccagcgttttagcgcgttcaatttcaatccctaaaatgtcagcctgaaactgcatcaggtaattgttgttgctagcaccgccatcaacacgtaaagcaggaatttcaatgcctgaatcttgttgcatcgtatcaacaacgtcacgggtttgataagctaatgactgcaaagttgctttaattatatccttgtcagtagttccacgtgtaacaccgaagattgaaccacgagtctccgcatcccaatatggtgcgcctaacccagtgaaggcagggacaacgtaaacctcgttctctgatgtcgactcaagcgctgcttgttcagagtctggcgcatgcttaatcaacttcatcgaatcgcgtagccattgaattgcactaccagccacaaagattgatccttctaaagcataagtaatcttaccattaatgccataaccaatggtcgttaacagattattgttagagtctgttggcttgtcccctgtgttcatcacaataaaggcaccggtgccatatgtatttttcaccattcctggtttcaaagctagttgaccaaataaggctgcctgttggtcaccggccatcccagcaattggcacttgtccaccatgacgctgtttcaccataaatctctgaattcgagcgcacctcaggcaacattttcttaggaatattgagcaaatgcaaaatatcgtcatcccacttgagcgtgtgaatattaaacagcatggtccgtgaagcattagtgtaatcagtcacgtgtttagcaccatcagttaacttccaaactagccaactatcaatcgtgccaaaaagcaactttccctgttcagctttttcttgcgcgccaggtacatgatcaagaatccagcgaatcttagttgcactgaagtatgggtcaataattaagcctgttttttgacgaatttcatcactgtagccttctttttttaatttttcagctaattctgttgtctgccgtgactgccaaacgattgcatgataaattggctcacctgtatccttgtcccaaacaacggtcgtttcacgttggttggtaatgccaattgcggcaatttgattaggccaaatgcccgaattaataaaagcattggcaattgttgtttggaccgccatccagattttattagcgtcatgttcaacccagccaggctctgggaaatattggtgaaattctttttgggcagaagcaacttcacgtccatcatggtcaaaaataattgctctagtagaggtggttccttcatcgattgctaaaatatatttttctgtcatagttattctcttttctgcaaaagcgctttcttataatattactgtttttctaatgcagattctagcagttaatgtaatagatacggtataatttttataaggattttttaaggagggcattttaatggaaaaaaatcaaaaaattgcggtaacaattgcgggtaacgatagtgatggtagtgcaggaatgccagcagatttgcattcattctatgcacggggcgtttatggcatggggctgatgaccgcggctgtagctggtaatacaaaaggaatttttgcccaacaaattatgccgcttgattttatccaaaagcaattcgatgtgttaaacgacgacttcaagattaatgcgactaagacagggatgctggctaacaaggaaattatcgattgcgttgccgataatcttgaaaaatacgacatgggtaaaatcgtgcttgatcccgtcatcatcactaagcacggtgccaccctacttgatgatgatgcctaccagaccttcttagacagattattgccgctagccgatgtaattacgcctaacttttatgaacaacaaaagctaactggcttgaagctaaataataaggaagaaattcacgcaggcgctaaaaaactacaagagatgggtgctaaaaatgtcttgatgaagggacgtcatgactcagataatcagactgaagtaactgatattttgttgactgaagatggcgcatttcacgaatttaccaagcctttctttaagactgatcgcgtgaatggcacaggtgatactctctccgcagttattgcggcagaattagctaagggaaagtctgtaattgatgctataaaaattggtaaggactttacttacgctgcaatttctcacccaattgatgttggttcaaaatggggtccgatcaatcacttggctgcacaggaagaaaatagatagaaaaaacaccgaagctcagattttgagcttcggtgtttttatgtctgttttcaattaaatcattgctgtgtagagatacagtattacacaaataatgaacgctattacgtatcccatgattatgctaataactcaatgaatatgatgatgttgcatccaagtagctaaccagtcgcccaggactagacaatatgatcctactaaccagtaattgatctttttctgattaattgctggtaatggcaagattaagattattattagcgctacagctaaaatatatttcaaggctgtatagagtttaggacttagtaatgattcacgcaatttattttaccttgtttcttctaaatcatatattcgatttccattaatttttggatttacttatttcttatagctcttaatgatccaaaatataccaagcataataaaaaggatcgataatactactagttgcataactggtttatatctaagaacgcatgaatctattagaaataccacaccaacagcaataattgtcattccagatattttgctttccttttttataataattattacaacagcaattaagattactactgcagttacaattgaagcaacgtcgacttgcattaacttaagtttttccttccatctaagtcttcaactattattttaaatcatgtaagttctcctgcgattgactttgtatcatatttgttacaaattattactcagaccaactagcaataaagtttttatagcctaatacaccaagatcctgtctaatctcttttgttttgtccttttgatccaaaaataatgctttcatataaaacacttcaattctataaatcatcaaatgaaacgacccagtagcattaataatatattccatcacatcatcaatatgatcaaaatgtgtcagttgtttatgaacctttctgtcgtaacaaaccaccagataattttctagcaatcttaaatatctttcagtcgttaactctgaaagctcagatttgtttgcaaaatcaagcaagcgcccaattaaaaagtccaattcatcttgtggccacatcggcatcgtattaaccagtaatctcaacaggtctggtcgctcaagccaattatttccttcatcaaactcagcttttattttcttcctgatttctacatcaatcttgtcagtcttccccttaaaatatgtcaaagtaattagtgctcgcaactttagaatctcattattagatgaattcattatctgctgacaatacttatccaaagcttcagtatctttcgcactaactgcttgattcattttagtttcaaattgcttctcaacttttcgttcttctaacgtgtagtcatcttgaataagatcacaaaattctactaaatcaatttgatgctcaagcaatatttgaaataagctttctgcatttatgcgatttttatcgctttcaacttttgcataaaacggtcgactaagaatcccttcgcacatctgctcttgtgttaaccccaacttcaatctttttttacgcagtgcttctccaattttcatagcaagcctcctgtacaatttttaataaaaatagcactttatactttttagtcaatgaaaaaagccgccccgagggacggctttgtagtggcgtagcatgctacgaatcaacgtaggagttggtcaagcatatgctttaatcgcttcttaagagctttcttaaagcgcttgatgcttccgcggtcaattggtataactactagtacgagaaagatacaccacttcacggagaatacacctccttctgcacgtaaagtaaaggcgctaccctttgtgacgtgcattttaattttatcatgatataatacagttagtacgagaaagtatgcacgtgatgtgcgtgggctactagctggtagctcaaaaattagcagggcggtcgaatgaccgtcttttttgtgcaaaaaaacagcaacgaaattaatcattgctgctaatttacttacttctttttctcaatcacaaaataatatcctgctgtcaaaatttgagcaattccttcaagcgtaattgccaaatctgcaccaaaacgcgctacaatcagcccgcctaaaaacgagccaattggaagcattgatgacagaatagagtcattaattgtttctacttgacctaaacatacctatcttttttagtatatggttctatctataaatataactaccatcgggataaaacgttattgctcgcttatccttgtaggactcaattaatgcattgattgaatttttatctttgaatcccattctttttgctaaataattttgcgtcctgcctgtatccttacaaagggaatttaatgttctctttagatacttaaaatcatacttcttatttaaagaatacattaaatctaaaagagatattattacaattgctaatctgtgaggataattaccattatccatattcaaatatttgcgatattttgtagcgactttaggcatggtcttcaacgaaatatctaccaaatctccattatgacaacatatatttctaattaaatttagcaattctaaactttgaattagacttttaatatctaaatggaataatttctgactaatttctttacggttatcaggtagcatcaacttggctaaatatatactttgcccgaatgataaagtatttaccataagccaaactgtgggaaatattcttgtacggtccgttcgttcaaatttttgaacatctatatagttagactttttcacttgatgctgcaattgtgataaaaaagccagttcttcattttttatcttatacttatctatttttacgcccataattcttccacgacgtttaacagtacctaaatatttatttcttccactattttgacaccacttttcaaagtccaaatataaatatgggtctgtcttacctaaaatataagagatttcattgttcaatgcagtttctatatcaccaattgcttgaaaaatttcttgctttaaacgttgatctctatagtatcttttaaccaattcatcaaagctaatacccatatactgattattatcatgatcccaaaatgcataagaatactgtttcaatttataatatcctattatttttaacgtattaacctgcttttcgaatttaatgctattttgatcaattccagtgattccttttttcttaaaaagaaggacttggtctacatatgaaagatgatgctccatgattttctccataaaaaaaccttcgctgatggataaatccgtcatcacgaaggtatgatctatcattattatacaagatttcccaaaaaaatgtagtatttagctagtatttttatcgaacgtatgattaattatatagttatttacatttcaaagcaaacagtagataaagtaagtaagtgtcaatgtttttgcggtagcctttaaaccattagtctaaccttaatttcttaaatatttatatgacttaaatttctgcttagcttgcttaaataactattgccagctacctgtgcggttaatgcgccatgctggatgcctaaatgaacttcatgacgcttctttaagctgtcacgggccgctgcttttaattcctgttcagtcaatacagttatttctgaatcttcaaactcgctgctaagccaaaattccagctctcgattcttgatgcagcttaagatcctaagcatgccttctgctccagattttgaccatttcttgccttgccccttaacacggtaggtatacttgcggtggttgctctcgcagcagccaatggctttagtcacagtcagttttcgtttcttaaacggcttaatatcgtcccaatgacgatcaatataattccttaggcgccccagataatcatgattgagctcggtattcaattcatcaattagtcggctttctgcagtggttaggatagttttaactttgtcatagctgtatttgtattccaaagcagaaatcagcttgccttgcaggtcaggcgcaaaatatagcctttctttgattttcttatttaggtgaaagacatccaagaaatgctcatgacgcttgcatagccctacaatgtcatcgaagtctgttttggcatatccagcaccgccatcggcgttgctaagaattacagtatcagaaagatcataagtattggccaggtactccttggcttcgttcagcgcatcaagtcggcttaaagaaacaaattccttggcattgattcgctttctgcgtttcttgcttatattgacaatgccttcacagacctgatagcgatgaaattccaaccggcttttagtgcctttgatcaccacgccatcgccttcaagatacaaaactgggacctttttcttagtgcctgcggcatcatatcttgaatctgcttcttggcccgctttaatatttttcccggccatttttaccaaattgcccacctgcatatggctaatattaaagccagacaggcaattgactgctagagcagtattgcgataagtggcaacgctgcttacttctaagatgtttttgactgctaaaatactgtagcgcttgtatttgtcaaagcccattaattcatccaagggataccttgcttgtttgcctgggcagacatatcttcttctgacatacctaacttcgccaaaagccatattgattgagcgctcattcttcttatcaatctgatagccctgtgctttaaccttggtaatcatttcatcatcaactttagctaaagccaaggccatgatttccttaatcaggtttaagaagaaacagattatttttctttcacgcttaatataattatcttcagactttataatatttgcgatttcagttacaattgaattcataaaagaccagcttctaatgttttttttgttcttaacatcagactactggtctttttgtttgagctcaagtccaaattcaaaggacttgggcttttttaattatttattcaacttaccgtaaaaaattatacacttagataaagtaagaaaaaaacagttacatgccataatgtaaacttagagatttttagcaatctacatctatgcataatttttgcatgaaaacagcaatgatgagtgtattttaatttacttctttttcccaattacaaaataatatcctgctgtcaaaatctgcgcaattccttcaagtgcaatcgcccaatccgcaccaaaatgcgctacaatcagtccacctaaaaatgaaccaatcggaatcattgacgataaaatcgactcattaatcgtttctactctacctaaaatatgcggactaaaactctcctgcaccaacacttcaaagttaatattcatcatcacaatccatagttcagacgtaaaaaacaaaatcaacagtagaaacggcatccctttgggaacagctggctcaagaacaattgctaaacctgataacgtgagacaaatgacgactagccttttaatcttgcttttatcaaaagttagtcgctgtaccagtacactgccaactaacccacctattgaagaagctaattctaaaccgccatagctaatcgctgatttagtcaaatgctcagtcgcaaaatatggcaagcccacagaggaaataccataaaatagattagtcactgcaaaaggcatgatcaagcgtgctattttgccttcttgtttcagagtttgccagcctttaagcaaatcttgccaatagttttctgtgaaatattcattcgacttattcgaaagtaataatttcctagacaatattagtcgcgtataaaaagctagggcgcttgcaaaaaatactgcagaaataattatcgtggaatcaagtgacacccaagtaatcaataacgttgccgctgcattcaaaaacaaatccagcgttttataagtcatttggaaaacgccgtttactttagttagctttgcttttgaaataatgactggcaaaattttttcttcagcaggataaatcaaagttgagccaatcgttgaaatgacgtatatccctagcaaaagccaaattgttaaatcttgccacagtttaatttgaaacaacaacgccgctataacgctgtccactatctgcactagcgttacaagcttaagtagctttttaatatagacacgatcaatcaacggtccgaagacgaacgacaacatttcaattgatgagtctgcaacaaagattaacgataagataagcggcgaatgaaagcgcaccttgaaaaaccacaagatcgccatgtaaaacaacgaatccgcaatgttggttaacactcgtcctgctaataatcgtctgacattgacattttctttttcaattaagttaaacattttcccattccttttcacaacactactaatgtcgctgaaagccagggaaaattactatttagttttagtttaaaatcccagactttcagctaaaaatctgggttgagccttaagtagcgtttgacgaatgaaaggaaataattcattcgcaaacttaaccctaaaatgtcgcgcattttagtcctcgctttctgtgaaaattaagatcattatagcatgaacagtggcttatcaataatagtcattctatccttatatttttcgtattttcattcaatttcagatcatgacttatgataataaccaaattaacttgcgctatttcctgcaatagttttaataaatcactttgtaactcaggatagatatttgccaacggttcatctagtaaaaaacattgcgcgccagtttttaaaacagcagaatataactttactaactgtatttcacctgttgatagttcgctcatctctctatctaaaatcttttcaattctaaattgtggcgaatcaaaaacttttgcaaaatactcgcttttataaacctgacttttatcagaatatgatcctaaatagtccctcactgaacaattagggagtggtatatcttgaaataaacaacttatgttcgattctctcagttttcttttattaattaaatcagcatctataccatttatggttatttttccttcctttttcggcgtgtataggccaattattgtcctaagcaaagtagattttccaattccatttctgcccctcacaatataaaatcctggagtaacaaaattggcagaaaaattttgggtaaataacggtgttttttcatctaagtaaatattaaaatcatgtacttgaatcaagtttattttagagattatttttctaccatcttgttcattcttcatggttagtatattgttgattctcatccacgctactttaaatgattcaaatttaaataaaatagaaaaaatttcatcaacctgtcccaaaagttgattaaaatattgaaaaataattaaaaaggaaccgattgtcatcttaccggaaatcactgataaaccgccattaataaacaatactaattgaaaaataagttgtaaaacaatctcgctattagacatatttaaattgagaagaaaatctctcttagcaacgcctaaaagcgttcttttagtattgctccatctctcagtttctattttctctcttcggttaccttttacttcaatatacctgcttaaccattcagtaaaaccagaaaagtacttattataagcttctttcaattttaaactaacttcaaaaatcttaggccgtaaaaataaatatatgagactatatgcaggcaacaggatcgctattaacaataaaaaaccagacccagccataaataaatatgtaaaaatcaaaattgaagaaagggcgattgaaataatttgatttattgtttggaataaaaaagtcaacacttcagtagtatcttcagtaattctatctgctgtttgaaccgaattcatctttgtaactgctagcgtatccttcacatacagttctttcattattacatcattaacttccatgtttatttctctaaatcttaaaatctgaattttgttcataaaatatgacaacaaaagtctgataagacttaaagtcgttattaatacaatactacgtacaaaagcagccctatcagccttatatactaaggaatttaacagtattccttctaagtaaacattaaaagtcaaaatgccagtactgataatattcattcctaatagaagccaatattcaattttatactttttatcaattttgctaaaaatcgtatgcatagtgtcacctaactctgactagcagtcaaaaatgttaaaatataatgaatataaaattagataaattttatattcttatttatcctatgtcaatactaaataaattgatttggttttactttcatgctgtatttgatattatgtagttactaactaccaaataactatctatcaactacagaaagagaaaaatatgactgaaaaagcagcaattaacatccgtgttaataaagaaactaagcaaaacgcagagaaagtattaaacaaactaggcatcccgatgtcagtcgcaattgatatgtacttacgacaaattgcattgactgacggcattccctttgatctatcttccaagaaaagaaaaaagaaaaatgatcacgaaacagcaatgatggtcgcagaagctacagctcaatatgaaatcgttaaatccaactgggaggataaattagctgagtttattcctgactggatgaacatgaataagatgactaaagaggagcttgaagcaaggttagctaagcatgcccaagatgcaagagatggtaaaagtgtcgagattagcaaaacttttagcgacctgaataaagaattaggaatttaaatttcatacaagaatatactgtcaaatcaagtcctaacgtatctgtagaacttaaagagatatatagctctatcttgcaattatctcgatctccaaaaactgctcgagattatgtaaaagatcttgaacaaactatgcaagcgttaaattattttccagaaagatatagaaaaactccttcaggaaaataccgacgagttaatttcaaaaaatacgctatattctactttatcgaaaacgatactgtacacattattgatgtcatactagcttcatcaagtacagtattcaaatattaatcctttgccccattctagctattaagctatactagacagaagaaattaaacgaactaagggacaataaaatgagcgataaattaattaaaattgcatacctctacgaagatttaatgaatacttacggtgactcaggcgatgttaaaatcttgagctttttgctaaagcgtgaaggctacgacactcaagtcgacaatatttcacttggcgatgacttcaatgcctttgactatgatttcgtcttcttcggcggtggtcaagactttgaacaaaccgttgtagccaaggatttaccacggcacaaagaaacacttgataaatacatcaacgatgacaaacctatgctctgcatttgtggtggttaccaactaatgggtagttactataagaccaactcaggtgtaacaattcctggcttagacattttgccacttcacactgtcttcaagagcgacaagcgaatgattggtgatacccgttacatgaccgaatggggcgaagttaaggcttttgaaaaccactctggtcaaacttacttcgacaacaaggacaagttgcatcccctcggcgacatgatcgaaggctacggcaacaacccacaagaccacgtcgaaggcctgcgctatcgcaactttattggttcatactcacatggtccactacttaaaaatactaatgtagctaatgccatcatgaaaatgattatcgcttggcaccaagaacgtgttagcgaagccgaaaaagtcacagaataaaaaagacccagtcagaatttctgactgggatttttcattatcaaattaatttaaaacacgtttagcagctgagggataaaagtaggcactgatagcctgctttctcaccccttgactaggagttgcagcgtgaacatattgtccatcaccaacataaataccaacatggtaaggagctgaggcagaaccccagaacaacaagtcgcctttcttaagatgacttaacgaaacctttttacccttagtaacttgaccataagtagttcttggtaaggtctttttagcggcttttttataaacgtattgagctaagccagagcagtcaaaggctgaaggaccggtagcaccgtaaacgtaacttttgccaacttgttctttagcaagttggactacggcgttacgtttttctgttttgctttgactagctgcttggacagtttgcgtttgaagtggaacattaatgaatgaaattcctgtaaaaaatactgacaaaactgtggcaaacttaactaaactacgtttaaaactcaatttatttctccttaacacttcttatctttcaacgttttctatattaccgaagaaatattacagccttgttttaaaatgactactataaaattaagcaatgtaacaaaatctgctatttcttgtaaattttgcttaacttgaaaaacactataattttctatatgcttaatacattaatttaggagttttttattatggataagatagatagttatgtacgccactttttaatattaatcgcgctaattttaggactctcgctcgtctcagaactgcgcgaaattattgcctatgactcatctaccattggcattatctctttaaccactgccattatctgcacttttgcttcgggcattaccttgcaatttcacaagcttaattggcttacgatcagtttaatcttaattctttctgaaatcgtaattctattctggttcaaaacctatacttttggtctcgttgtcagcatttttctgatttataacatcattgtatttttggtttgtgttactaatataatttttcaaaagaaggttgaatagttaacttctatgtcagtcgttgatctctataaaaactcagcttaaattgcctatctttatgaaaagcataaattaggaaggaataattatgactagcatcattgtgtttatcgctgttacaattatggcgatattcacaggaattatatttatacgcgtggtgctagttaaatcgttttagttaataaaaaagtccaattagactagactcaagttgtaagtaatttaaatagaaaagagtctgatctaattgaactatctcaagcttaatcgtttttctcaccatttacaagttagttttaatcggttaaatgtgatttgtcgctcgctgtataagctttatgcgcctgatggacttaaacatcgtaaaaatgttgatcagaccaagcttcctgatagttctatcttagcgatgctcatttggcaaactgaaattggaattgaatctcaacgaagattctgtaaattcttcgttggcttatctcattctcgttttaaccgtcgagctcgaatgctcttgcctctaattcgttgtatccgtcagggttggaatcaggaagtaaaggtaggtggagaattattgattatcgacagttttccgattccagtttgtcagcctgttcgcaattatcacgttaagatcttccgtggcatagccgatattggttataaagcgacgaaaaaaatctactattatggcttcaaagtccacgcaatagtgagtgatgatggctatctgcttgactacgcagttactaaggcgtcggtacatgatgcaaaagagacggtagaattgatgatcaatgctcatccaattaaccattatcttttaggagatgaaggctatttaggaaaagacttagcagccaagctaaagcgtatgggatacgtgctttggacaccatatcgtaaaaacatgaggggtgctaaaaagcataatgatcatcagttaatggcaattagaagaacaatcgaaagcgacttttctttgcttagctattacaatgctgagaataatcgagccaggagcttagtaggttttcaacaacggctagaaatagctattttagcttataatatggcatattgtctagaacgatttaactagcaccacgcgtatatttataaaattatcaatgcgcatgtaacctataaaaagcattatccttatcgtaaattagtaagggtcactttaatcagtctcccatggatattttgggtcttcccgtttactctagattggagtacctatatcactttagtaatagtcagaattccatatacaatcatctggagtttgttaactgcggtaggattgtatattgatattaagatgcaaaataaatatcgacatcacaggaacaacaatggacactaaaattttaacagcaatcatcttaattatcgtagtaattgtactagcctactcaccattttataaaaggtatcaactattttacttgaataaagtaggctattgggatatcctaatccaattcctagtaattgcaggtatcaacttattcattggattaaaatacggtctaggtgccctgtttctattgattgttcccgttccactagacattattttcttaatctcaatgatttattcttactttaaaattagaaaattgaaacgcaaataactcaacaaaacggagccaactaaagcttcgttttttgattaatcttatttttcttctgtttcggcgttagattcaaagccatcgcagccacgacaaccaacactgatccgacccaatccattggcatcattactaagttaaagaatattacagaacctatcgttgcagaaaatggctcaaaagcatctaataaacttacagttgatgggattacataccgcagcgcgtttgccataatttgaaacggaataatcgtcccaattacaataactgccgcagtatacagccaaacttcaggcttattcggaactgcatgaaattgcggatcaattatcaacaaactgattccagcaaaaatcatcccccaacctgttacaaccatactagaaacttttttaacaatgttaactggaatcaaagtataagcagcctcaccaaaagcggataaaatgccccaaaatagtgcaactggcgtaatggccaaatgattaaattgcccatgcgttgacaataaaaacactcctaaaaaagcacataacgccgctatgatatccaatctacgcataacttgcttgtgcgtgatagctaaatatcccaatacaaaaaatggcccaataaattgcaagattgtcgcaatagaagcattagccacttgaatacacataaaataaaatagctgcactggcaataatccaaatatgccataggctataataaccaaaacattgtgcttatttttcaacgtagctattggtttttgctttaaaaatcctgaggcaattaataaaactgctcctgaaataatcaacctgacttgggttaaccacattggtgttaatttaggactaatatcaaacaatcctttagcgaataatcctgacacaccccacattacagctgccattgccgctagaaatgtccacaatcttcgtgtttttgctggtaccatctagttcacctttttctttctcattcacctaataattaaaccacaaaaataaggatacctactgggcatcctcaactttattgatgagtttttttaactttctttttcttaggtgaaatattcaaggccatagctgccagcacaactaaaatcgaaccaatccagtccattggggtcatcaccaaaccaaagcaaataactgaaccaacggttgcagaaaaaggctcaaaagcatctagcaaacttgccgttgatgccttgataaagcgcagcgaattagtcattaattggaatggaatcagggttccaatcacaatcactgccaccacatctagccatacatgtggcgtattcggaatatgcggcatctgtgggtgcacaatcattaggcaaattcccgctgacagcaatccccaacctgtaacgactaaactagaaactcgcttcaacacactgattggaattaatgtattggtcgcaactccaacagctgaaagcaaaccccagaatagaacgctaggcgttaaagcaaagtgattaaaacgcccatgtgtcgccagcaatactacgccaataaaggcacagatggcagcaagcacatctattcgccgcattacttgcttatgcgttacagctaggtagcccattacaaaaaagggaccaacaaattgtaaaatcgtggcaatcgaagcattagcttgttgtactacaataaagtaaaacaattggactggtaataaaccaaaaatcccatatgcgataatcgtccacgcgtcatgcttatttttcattgtagcgattggcttttgctttaatacgccagctacaattaacaaaataatgcctgaagttaccattctaatctgtgatagccacattggtgtaatctcaggactagtattaaataaactcttagcaaatagacctgatattccccacattatgcaagctaatccagctaaaaaggcccacaggcgccgttgtttttgtgtaaccattctttttaatccccaacttttctaaaactaacatactctatcataacaaaaacgggctagcttgaactagtccgttaattttttattcatcatttttcttaattgggtttctgctaggcattagctgcatgaatgtagcaacaataattaaaaagccaccaaacatgtccattgggccaaagtccgcatgaagcagtgaaactgacaggatcgttgcaatcagtggctcgaaggctccaagcatccctaccgtacttggttcaatatactgcacactagataagtacattgtataagctaacaatgttccaccaataataatataaacaattacccaaacatcaactggtgcaagttttggcattggttgagtgaagtaaattggtaaaaaggcaatgcctgcaaccaacattgctgcgccgattactggaatcggcccatactttttgaataatttcccaggtaatactgtattaatcgcttcagaaaaagccgcaattaagccccagaaacaagcaagcggtgataaagcaagttgatcgaatctgccacctgtagccaagatgaaggttcatacaactgctaccacaattgaaatcgcatcaattcttcgtggccacatcttacttctcaatgaagaatatataattatgaaaactggcgctaaaaattaaatcaccgtcgctgtcggagcattgctgtacttgactgctacaaagtacgataattgtgagctccccattcctaagaaagtaaaaatgatcaacataatgattacttttttatcatgtagcattgccttgacttggtccaagtatttccaacaagcataaatcataagcagggcgcctgaaaaaagcaaacgcagacctacaagccaagcagtatttacattagtgctagaaaataaaaattcaaccgccgtacccgatgcaccccaaaaacaggcaccgacaacagctaaagtcaatcctttataacgctaattcacattcacacatcctttagattaatgtttttcattgtaacatgggctaaaggaaaagttcaatgcttctaaagttgatttaatctatataacgtataacctgacacgctagccaataagccgattgtaaaaagcaaccaagattctggatgaaaggcaattaaaacaagtgaaagaaagcctgctgctaaactagaattgcgttccattcgctttttgccaaaaagcagaccacacataatgccaaacatagttagcacataaaatgagtcaactaacagtaacaaattctcaataattgctagatcacttggctttacttttacactcaaatcagtaaaaatctgagcacagccaaaaaataccatcacaaatgcagctaagatcgtgataaagctaatcgtacgaaaaactgacttcaccttttgagttggcgtttcatcgataaaggtttttaagaaaaactcgtgatctttttttgctactacagctctgcccatcttcttgtcataccagttcaatagaccagaaccaattagcataatagcaatcacagcaaactggatgacaattaaacgcatgaaaattggaaaggcatagattaccgtcaataacaaaattactacatagatcagctatgcataaagaaagaaatgcagacgctgtttatttttgaaaatagtttggaatgtttttgaattaggatcttgcataagacttctccccactaaatcttattacgaaaactcaaccagaaatttgccccactgagaatcaagccaataacagaagctacttgcatgcttggctgcatgaaaagcaagatcagtgataaaacaacagttaaaacgctagacgcacgaattaatttacgatttccacctaaaataccgacctccacacaaaagagtagaacaacatataggccatcaccaatcagccaaacattttcaaagagattggcaaaattaccggtaagcggcttagccaaaatgtcagtccaaagctgacgtgcaaaagcaatacttaaaccgatatttgcccaaaagagcaagaattcaaataagtgaagaaatacgtttttagtaaatctaatactagtcagtgtttcccagaatgtatcgtgttttttaatcactatccttcgatcaagaaaggcaccaattgaatagtaaatcagaattgcaatcccttgaaatgcaatcaaatgcataaaaactttaaagtcaaacatcaatgtgaatagtaaaactactacataagctaactcaaaatataatacacagcgactaaactttcgctcgctaagccagtgcttcaattctcttttattcatatgatcactaatattgccattcatattctcaccatcttttaataattatctaattatgcaaaaattgtataatgatttcaaaattttgtctagtccttttataattgatttagtaaatatttttcgaggtaaattatgaattatcccattttaattgctattttgatcttcttgctgtgctttggccgattcatttggatcattactcacgaacgtcgttccttacgcgctggagttagcttagttatcaccttatttagtttttttttttaggtgtagtcattctggttaatatcgctgaccttgatccacattacaaagactggattttgccattatttgtgattgcgctatttgctgtgatggctggaacgattatctttgcattaactttgatcattatgtttttctacgatggcattaaaatcattatcaaagaaggaaaccgctggacaaattatctttctctgggcatggggatttccattatcttcttcctatttttatatcctcttgtgggacgaattagtcatgatagctggttaaagtatccctatatttttctatggctagtcatcatctacttagtcactatcatgatgatgtatactttaacttcttggattaatttaattaattggcacatgccgcacttagactacatcgtagtgttaggcgctggcattatgggaacaaaggtaacaccacttctggcagctagaatttcccggggaatagaaatttatcacaaaaatcctggctctaagttaatcatgtctggtggccaaggacctggtgaagacattcctgaagcagctgctatggctgaatatgctgaaaaactgggtattaataaaaacgatattattatcgaaaataaatccaaaactacccagcagaacttgcaattctcacatgcactgatgaaaccaaatagtcgcttctgtattgtaaccagctcctaccacgtgtatcgcgctctggttttagctaaacgtcaaggactcaagtgtactggttatggtgccaaaactaagtggtattttactttaaatgcttttgtgcgtgaattcattgcatatctggtaattactaagaaaatgcaattgactatcatcggttttctagcagctatcatgattgctgctgtcgcatttcatttttaatttattgcgttaagttgagaaacttagcgttttttattgatttatcttttaatttttttataattatagtcaaatctatagaaagcaaggtgtaactatgaggattcgtaaaaacaacttgtcaaactgtcattagtcaggatgacgagtcctgactttttcaaaaaagtaggttacttatgtcagaaacaaaattcaataaaactcttcttagtgtcagtcatgtggatttttcctaccctaagcgcaatttattcaccgatctaaatttttctattgctaatggtgaacgtgttgctctagttgggcctaatggaattggtaaatctacactaattgacctaattcgtaagcaaatccaaccagatgatggacagattatttgtcacggtgaaattaattatgtacctcaagtcaatgatcaaactgtaattaatgactcaaagagcgctggtgaaaagcgattagctttaattgaaaatactatttggcttcctggttctcttctcttattggacgagccaacagtttacttagatgacacaaatatccagaatttactctacttactcaagaattatgatggagcaattctagtagctagccatgatctggattttatcaaccaactatgtgagagaactattattctgcagccaaataatgcagtttattacccaggaaattacgcacagtatctcgaacaaaaacaattagataaacaagccgtacacaattttaacgaaaagcgagatatattaaagcaacaaattactgaaaaagtctctactttaaagcaaaaaagtactgactataatcattttgctaaaacacaagacaatactggtcgctatccttcacggagccatgatcatgtccaaaaaggattaaatagtcggcttaagcgagctgaacgtgaactggctgagcttccagagaaacagcatctatatcaacatcaacttaaacttcctgaatttaaaaagtggccgactaaaatacataattactctatcaaaatagatcaattactcagtccccaaaataagactttattatctaatacacagttaaacttgcaaacagccgatattattggattaatcggccccaacggctgcggtaaaacaacattgctcaaatatttagaacactacattaatcagcagcaatctttgccaccagccagctacattggtttaaatacgactaaacaaaagaaacctgccacagtagcagatttctttcacgagactattttgagcaaaactgaagttaagcgtcttttagttaaaatggatatgtttgtcgatttgactacaagactcacggatttgagtggtggcgaatttgctaaattagcattaatcaagcagctataccttgaacaagaatctattctattacttgatgagccgactaactatcttgatccagaaagtgtgacggccttggcccaaatgctaaaacagtcgcatctcacttgtattattgcatcccacaattgcaaatttttaacccaattttgccaacaaatctataaaattaagcagcaaagactaattgaattgcactaaagcatttctcttaaacacatatttgctaagcatatcctttactatccccatctatattaatgaagatcacatttggtgctgcagaagtttggtgcgtttctttattatatttaccaccataatactcataacgaggtttccccttgccaaaaggatctattcggcaaagaaagatcacatatgtcgctttgaattctttttccggagagccacctagcccgccatagattatttcttcctgataagcgttggcaacttccagaatgttttctcctggttcttgcgaccctacttgaattattaacccgtatttattgcgcttcttgtctcgcgcaattacatgtacgattgctttttcatctaagacatttctatttggatcatcaagtgattttgcttcctgaatatcgagttcgggaagcattctttgtactgctggaagaagctgctcattatacttcttcataattcctgcagccaagtgatccaccattgccggtgacatttcattttctaacataaaaaaatcctcatttctaaaaatctgagagttttatccctctattacttattacgcaaaaaaacgcaaaaattttttcagaaaatgaagatttttcaattttttagttttcttttctaaaaaatggactgagtagcgatacaagcaggccgtaaataaaataccagcgataaatatctgccaagtcttgattttgaatccacaaaattattgcaattactgtcagtaagccacctaaaaagattgttgaacccatatttttatcagtaaagaagctgatagcagcacctaaggtaattaacgctaccaaactataaatgacgataatcactggtcctttagtctgaacgttaacatcaagcattggtgcgttagtaaacagctgccacacgataaaaccagctaatgcaatgccacatagcaatactagtaatctaaaaacaaaagttaaagtctttttcattatttttctcctgtatgcataataatactagtataacagcaatatcgcggcatacgaaaagcgcttggatttttccaaacgcttttttactattcttttgcttgcataaattgttttctagtgatgtatttgattgatttaacgtattgccccttgtgttgaattgaaatatattggcctgatggatcgtagccgccaacctttttcaacaataaattctttttcgtcttaggattatacgccttcacattgtaataccgctgtgtgcctttatctacttgagcatagcttgtttcctgggaaatgaatggattcaatctatcagtaaaagagttatgaaatgaaaaaatgcagattactcccactactagcactagtgccgttacaaatgcggttttaatagtacttttattcataatattcaccttcatcgttcaactattgttatactaaaatagtacactcattcaatgaatttagcaattgttttcatgaaaaaaacgcttgaaaaattccaagcgtctttcacctaagccaaaaatctttttatagcttcttctacactagcattcaatgattggtgcttcgttgcagcataattagccaatttttcatgtaatgaaggatcaatgcgcacattaaaattacctttaaaaggtttctctggtataactccatcttccttacagctcattagataatcatcaatggctccttgaaaatccttctccaattcatctattgtattaccttcgtaagaaataagactcttaatcccctgaaccttaccaaaaagaatcttatcctccaaagtatattcaattgaaccttcataacccttatacttcatatattgattagtttttttcatctttcccggatttaaaattgaagtgcaacactaagtgttaaacaaaaaggccatgaagacctaaacttgaagtgacgaaaaatcaagaaaggaagatctttatgaccaattcaaattctagcatttctaagcactatcatcaattaaccagcgtacaacgtggacaaattcaagcaatgctggattccggcataacttcccgtactgttatcgctcaagaagtcggctgccataagtcgacaatcagtcgcgaaatcaaacgcggaagtgtcctgcaaagagacagcagctatttattgtatgagcactattacgctgatactgcacagatttattatgagaagcgtcgcaaaaactgctatcagcgcaatccattgaagcattatgctgtctttttgagaatgctctccagacgctttaaagctaaatttgatgccaccagcatcgatgagttcgttggtgaattcaaaaggactatgccaggctacccttgtcccagcacaccaaccgtctatcgctatattgatcagggcttgctggacataagcaatattgatctgcctatgaagctcaaaagacgcaggaacaagcgtcatcacagccatggcggtcacgctttgcacaagaagcatcttggcaattccattgaacagcgtcctaaagagattgaagacagaaaagctccgctgcactgggaaggagatctggttaaaggcgtcagacgcaagaatcagcctgctttaatgactttgactgaaagaaccacacgctttgaagtagttatcaagattcctgactatcgggcaagcacatgccaaaggctgcttcaaaaggagattgacagacatcctgcctggtttaaatcaatcacgtttgacaatggctctgagtttgcggatatgaccaagatcaagggctgccagatttactttgctcacccatattctccatgggaaaggggcaccaatgagaactgcaatggtcttttgcgtcaattcttccctaagggcaagagcatgaaagacaagtcaaaagcttatgttcaacaggcaactgatgccattaaccacaaatatcgccgaatcctccaatatcacacagcagaggaactcttcaagcaatatatctcttcataacctaactgttgcacttaatttgacaattcaggttttttcatctttattcatctctttgattttatcttgaatttgtttgatttgatatggtaatagttcttttctaggatgtggtttatgaagaatgagactgtaaaatagtttgtgtaaggatgaatgattccttaaatttatttctttaaacattagaaaaaggagttcctttctcgtatgattggtttgaacaaaaaaacacatacagaaagaagaactccttcatgaatgattttaccaaagattttgctcaagctctattcaatccagacaaaataaatgatttattgcgcaaagagctacaacaggctgttaataacttgttagaagctgaattgaccgcctttctgggctatgatccctatgccagaaatggctggaatactggcaactctagaaatggtgcttatttccgcaaagttgatacgcaatttggcccaattgaagtgcaagtgcctcgggatcgcaacggtcaatttcatcagcacacgctgcctgactacaagcagcactcggatatcttggaaagcatgattatcaagctttactccaagggcgtgaccaccagggaaatagccgatctaattgaaaagatgtatggcagccattacagtccagctcaggtatcaaatatttccaagcagatgattccaaaggttgaggcttaccacaaacgcaagctaagcgacaagtttttctgcgtctatttggatgcgacataccttcctttgcgccgagaaacatttgagcgtgaagcagtctatattgccattggcatcaagcctaatgggcacaaggaggtcattgactactgcattgcgcctagcgagaacattgaagtctggacagatatgcttcaaaacatgaaatcccgaggcttaaagcaagttgagctttttctttctgatggtgttgttggcatgaaaacagccttggccaggacttatcctaaagctcattttcaacgctgtttggttcatgtcatgcgcaatatctgcgctaaagtacgcgtcgacgatcgtgaaaagatcatgaacgaattcaaacaggtgcatcaacagacaaacaaagaagaagccacagctgtcctgcatgacttctataccaaatggggcaaggtttacagccatgttatcagaagcttgaaagacatagaaccagatctgctggtcttttataactatcccaagcagatcagagcttcaatttattcgactaacatgattgaatcatttaacaatgtgatcaagcgcaaagctaagcctaaggcagagtttccaactgaacagtcgcttgatgcttttattggcattcaggcaatgagctacaatgaccattatttcaatcgaattcataaaggctttggtcaggttcaggacaccttagaatcctactttgattaaataaataattaaaaaatcaatttacgagaaagatctatttacacaaaagatttgacagtttctgaagaatgatccgatcactgccctttttaaaaataattctagatccactcgtttttcctttattatcgagttgataatctagttcatgcaatagtgttttagcatctttaaagtcaaacgttcttggatgactatataactttattaatagcttttctaatttacccacgttatcctcacttaagtatataatataatatatcatttgtaactaaatttgcaactaagacaaattatacctaattcgctaaattcacgctactaaaaaagcgcttggaaaattccaaacgcttcttttgtttaatcatctagacctaacttcttaaagatatcatcaacatgacgcaaatgatagtgataatcaaatgcatcatcaatatcttccttggataggtaattcataatttcactgttttcaaccaatggcttaaactgcttttgctcattccatgatttagcagttagcttctgtaccatatcataagctttttcacgagatagacctgcttcatcgatcaacttaagcaacactcgttgagagtaaattaatccatatgtacgatccatattcttaagcatcgtttcagggaatacatctaagttagtcaaaattcgattgaagcggtgcaacatatagtcgacgccaatagtcgtatcaggcaagataactcgttcggcacttgaatgagaaatatcacgttcatgccataacgctacatcctcgtatgctgtaacgacatgtccacgcattactcgagccattccacagaggttttcagatccgatcgggttacgtttgtgtggcattgcagatgatcccttttggccagcgcggaaatgttcctcaacttcatgaatttcactgcgctgcaagccacgaatttctgtcgcccaattttcaatactagtagcaatcaatgctaatgtcgcaatgtattctgcatgcaaatcacgaggcaatacttgactagtaattggctgttgtgtcaaacctaattgcttcattacgctagtttcaactgcaggtggaacattagcaaaagtaccaacagcacccgaaattttgccagattcaacgccttttgcggcatgttcaaatcgttcaatatcacgattaatttctgcgtaccagcgagcaatcttgagaccaaatgtagttggttcagcctgaacgccatgtgtacgtcccatttctactgtgtacttatactttttagccttttctgcaatagttgcttttaattcgtgcagatcttttctgataatctcatcagcttgtttaagtaagtagccttgagcagtatcaaccacatcagttgaagtcaaaccaaagtgcacccattttttctcagggccaaggctttcagacacagttctagtaaaagcaaccacgtcatggtgggttacttgctcaagctcagccacacgctctgcagtaaagcttgcattcttagcaatcttctccgcatctgcttctggcacttcaccgagttctgcccaagcctttgttgcggcaatttctacttcaagccaagctgcatatttattttcgtctgtccaaattttccccatttctgggcgagtataacgttcaagcataaattacatttcccatggattcttcaaaacaatagtttgttcacgatctggaccaactgaaacagttaccaaaggaacgccaaccaactctgaaacgcggttcaagaatttcttagcattttctggaagagcgtcccaagtcttaacttgagtaatatcttcatcccaagctggaagttcttcatatacaggcttacatctgtataattccttcaaacttgctggataataatcaatcttttcaccatcaagttcatatgcagtacaaatcttgatcttgtcaaagcctgaaaatacatcaagcaagttcaagctaaggccattgataccagcaacacgctttgagtgacgcaatgcaacggagtcaaaccaaccaacacgacgtggacgaccagtaacagtaccatattcatgagcagtttcacgaatacggtcaccaacttcatcaagcaattcggttgggaaaggaccggcaccaacacgagtagtgtaagccttgcagacaccaattacagtatcaagacgattagcacctataccaatacctgaacaaataccaccagaaatagtattagatgaggttacaaatggataagtaccttcatcaatatcaagcatcacaccttgcgcaccttcaaataaaactttcttattttggtcaagtgcatcattcactaagacagaagtatcagttacatacttcttcattctttgaccatattcatagtatttatcaaaaatgtcttcaaatttaagtgctggcttaccataaaccttagtaaataattcattctttacttcaaggttagcacgcaatttttcttcaaaggtgtctttttcaagcaaatcacaaacgcggattccaattcttgaagccttgtccatgtaagttggtccaataccattcttagtagtaccaatcttgttagcccccttagcttcttcttgatattcatcttgcttaatatcataaggcataatgatgtgggcacgattagaaattctcaagccactagtatcaatgccactcttttcaagattttctaattcgccaaacattacttctggattgattacgacaccattaccaataactgtattgtccttggctgcaaaaataccagaaggaattaaacgcatcttgaaagtttgaccattaatatcaatagtatgacctgcgttgttaccaccatttgaacgaactgcaactgcagcatccttactcaaaaagtcagtaatctttcccttaccttcatcgccccattggcttcctacgactgcgactgctgtcatttaaaattcacctcataaaaatctctataaatattacgtatgctagtctagcaattaatttacaaataatcaatataaaatccgaattattttatttttaaattatttcatagttcgattttcatattgacaaacacaaattattcccatatagtatgtctcggtcaacaaacaagattaaagggagcagtttttaaatgagtaactactttagtatggaagcctttgactatgatgatatccaacttgtacctaataagggtattatcaaaagccgtcgtgatgcagataccagtgtcaaattcggaaaccgaacatttaaaataccggttgttcctgccaatatggaaagtgtcattgatgataaccttgctatttggctagcccaaaacgattattattacgtaatgcatcgttttgaacccgaaaagagaattaccttcatcaaaatgatgcatcaaaaaggattatttgcatctatttcggtcggcattaaagacagtgaatatgattttattgatgaattagtcaaggaaaaccttaaaccagaatatattactattgatgtagctcatggtcactccgtttacgtgattaagatgatcaagtatattaaggagaaattacctgattcatttttaacagcgggcaatattgctacgccagaagccgtacgtgaactcgaaaatgcaggcgccgacgcaaccaaggttggtgtgggacctggtaaagcatgtattacgaaattgaagactggctttggtactggtggttggcaattagccgcattaagaatgtgcagtaaatctgcttctaagccattaattgccgacggtgggattcgtcataacggcgatatcgctaagtcaattcgttttggcgctaccatggttatgattggttcaatgctggccggtcatgaagaatcacctggtaatgtaatcaaaattaatggtaaaacttacaagcaatactggggctcagcctctgaggttcaaaaaggtgcttacaaaaatgtagaaggtaagcaaatgttagtgccataccgtggctcaattaaggatactttaaaagaaatgaaggaagacttgcagtcatccatctcatacgctggtggtcgcgatcttaattccattaagttagtcgactacgtaatcgttaaagacaatatttttgatggtgataagtaattttaataaaatttttgcatttttattattttcctgttaagaatattacgataatatagtattatctatcttttttcgatagaataatataggtcgagttattgtagggtagtcaataactcggctttttttgattattttttaaaaacgattggacagagttttaaattgtgttatactagttgtcgttgatgaatgcgcccttagcgcaactggatagagtgtctgactacgaatcagaaggttgaaggttcaaatccttcagggcgcacttaaaaacgggaaatggctcagtttggtagagcacctggtttgggaccagggggtcgcaggttcgaatcctgttttcccgataagttagccgcacttcattgaagtgcggtttttttgtgtaaaaaaataagtattccctcggaaatacttatcatgctatgcccctttagtagctcgtctaaagataatctgtgtatctgaatctacatatttcaataacggtaaatcgtaatccttaacctgggccaaaacatttactttctcattgcatggcaaatcgcgtttagtaatctcgatttcgccttcataacgcggatacaaatgattatcaatcgtcacgctgccagttggtctagcataaatattatcttgcggctctgttgacaaaaacatcttttttctgctttcctttaagcgaactacgtcacgcgccacatctggacgattatgccaatcattgccaaacaattctggtatatcagtatctaaatgcagtgtaattgcaccctgtttttgataattagtaatcgattcaattgcatccctcgtaagttgcggatctcccacaaaaatgtgatcgcaatcataatctttcaattctaagatcgcagctaatgggttttcatatcgctgcttctccaacgttggcaatcctgcaaaaattggtccacgcaatttgccatttcctgaaataaaggctgctgttttcaaaccatattgcttaagccactcattcttcttttgcatccagtgtgcatcaagacctgtttcaggacgtgggtagaagttatgtcctgctgttaatttttcaaaatttgcattgctataacgcagatcatcaatattttgttgcgtaataatgctggcatttagaactatcggcatttctttggacaacttggcaataatatcagtagaaaatccatgatctactctaagaccagttagactcaaacttttaatttgctcaacactattgacattaatacccaaatcttgcagatcatctgccgtgacatctgcaataattttcaagtctagtttttgacaccaattagttaagtccgccagccgatttaaaatcgtctcactatcagtatcaggtacagctagctgagtaaaaacgcaggtaaatccactattgcgcatcgtcagcaaataattgtaattctcggacgtcaaatcgtgtcctagataaacagaaaatcctaacattcttattcctctaaaattaattaatttcttttattatctataacttaaacgctttcctaaatatcttactacattttttgcttgcttttttctaaaaaataatgttaaatacatataaacaaattaaaaagcgatgaaaaagacgagtaaataatctaattctttccagtgaattagtgctagtgtgaaactaatagaccctggattattgaaaaacacttttagcagctcactgaaacaacaattcttagagtaggttgagacgtctccggtacgttaccacgccggtggagcatgatagtgcttcatgagtcggtctattaaaatatagacaatgtgggtggtaccgcggaaaaaagcctttcgtccctgtttttttagggagcgaagggctttttctttgctctaagtacattagaaagaggacttatattatgacacttattttacctaaagattatcacccaacattaactgtgcgcgacactgaagctgcgattgtatttattcgtgaaaccttccaagataaattggcagaaattctcggtttacaaagaatgtccgctccaatgtttgtcgaaaaaaagaccggcttaaacgacaacttaaatggtgttgagcgtcctgttgcctttgacatgaaggcaatgcctaaagaagatactatcgaagtagttcactcattggctaaatggaagagattggctttgaaacgctatggtttcggaatgcatgaaggactttacaccaacatgaacgccatccgccgggacgaagatcttgataacttccactccatctatgttgaccaatgggactgggaaaagattattagtaaacaagaacgcaacaccgacacacttgaagttactgtgatgaacatttttaaggcaattaaggcaactgaaaagctggttgctgcacgctacccaggctctacttatcgcctagctgatcacgtttcatttattactactcaagaattagaagatcgctggcctgatctttctccagaagagcgtgaagataagattgctaaagaagaaaaagccgtctttattatgaaaattggtgacaagttaaagcgtagtggtgaaccacacgatggccgtgcaccagactacgatgattggcaattaaacggtgacttagtcttctggtatgaaccgcttaacagtaagattgaaatctcttcaatggggatccgtgttagcgaagaaagtttgcgtgaacaattgaaaaaagctcactgtgaagaacgtgagaaattaccattccaccaaatgcttttgaagggtgaattaccttattcaatcggcggcggaatcggtcaatctcgtctctgtatgttgctgttaggtaaggctcacattggtgaagtacaagcttctatttggccagaagatatggttgaggcttgtgaagctgacgatattaagttgctgtaattttaagatttttttacataccaaaaaagatcctgcaaaatgtaggatcttttttctattgattttatttccgttctcttctagaaatccaagccataatcaatggcaacaatacaaagccaaagaccatcatcgcaatggcataccagttaacaccgataacttgccctgctgcgtttactacaccaaattgtgccttccagttatattcaactaacaagaagatcacaatcacaccagataaaattggcacaataacatcagtcataacgctcttattagcctttaagatatcttcttttgccttaccacggtaaaattgaataactgctagaggtaccacgatgaaacctaagaatctaaccatcgcgctcaaagtaatcaagttgaccatattgtattcaaaggccatcggaatcaaaattgccaagccaacagagataaagaaagttctaattgggaagttattcttagttctcttagttaaagcttgtgacatctgaccctcacgagccatagcttccagaatacgtggagcattaaagctggaagctacgttgatcccaaacattgaaaccaaggcaccaaccaagattacatcacgtaagatttcattattaaaaatagccgcaatcgctacaacttgcttagttgtcattaaagcacgtggattaagtaccatcgctaccgctacaacgccgatatagacaaccgcaataattaagattgccaatggaattgctcgtggcaagttcttttcagggttcttcatatcttctgaaccagaagctactgattcaaagccggtaaaggcatagaaggctgaaacaattgacatgacaaaggtagttgtagttaaagttggcacaattttctgaccattctgagtcaattgatctacttgccctaggttgcttgatgcaccagtagtaattaacaaaactactccagcaataataattaataccaatgcagccaacttaccgatagtagctaaattcattacatacttaactactttttgaccaaacaagttgatcacggtaataattgccatcaagatcaaaaagccaattgtgacatttattgccttattgggatttccgccaaaaattgaaatagttgacttaattaccccaacagccattacgccccaagctacactggctgagaagtaacgcagaactcccatataaaagccaatttttttaccaaaagcggccttggaataagcataggcagcaccagatttagtgacatactttgaagctgccgcaaacgaaatggccagaatcgctgcaaaaattgccgcaattaaatatacaactaaagctttactaccggcttgctgtaccacactaccaggtgttaaaaaaatacctgaaccaataatggcattaatcgctaacagcacaattgaccaaaagcctaatttatctcctgttttttcagtcatctatttgcttccttactttgcattatcaacaacaaacttaaataagttattcataaacgctacatcggaattacggtgcaacatttcagggtgccactgcacggcaatgacattaccttgtttattttctagcccttcaaccacaccatcaggagctgttgccactgcttttaaatctggtgcaacgtctttaattaattgatggtggaaagaattaacgcgaaattcagttttgcccaaaatttcagccaatttactatcagcttccacttccatactatgagtaggcaaagttggcgtatgaccttgcatgtgtttcaaagtaagttcttttctgtatgaaagatcttggtaaagcgtaccgccatgagccacattaataatttgagcaccacgacaaatgccaagtaccggaataccattttcttctgctaactttaacaagcgcatatcaaaatgatcgcgttcaggccaagtagcaccaatcttttgcattggctcctcaccataaaaacgtggatcaacatcatgcccaccagataagatcaagccttgaacatgattaagctgttcacgaatcacctcatcattttcagtaaatggaataatgtaaggcacaccgccattttgaactactgaatctacatagtcttcgttcacataactacgatggtatcctgggaaaattcctctatcgtcaataattacagaacctgagataccgataattggttttgtcatttatgctcctccttctgcttactttttgtatgtaatattatagagaaatttatgcaaaaagtacaattaaaaaattgcattgttgtctataatttttgcatatctttaaatatagtaaaaaacagcaagccttatttttagctcactgttttatgctatttataccaaattccaaaaaggatttccattacatgctaaatatgtttctagccactgtttaaaagagaaatcaaaatattgttcctctattccaggatacgttagataggactgtttttgattgtagcgatctaaattaatgcccatttctccctcgtctcttaaccaaagtataggtagataattaggtgttttaactaactgatttaagacatactcaatagtgtaaattctacaccttgctccacctaattcgatgccttgaaaagaatcaatgaataattctgcaccgttagcctgtatccaaaactctatcaaatcatttgggacagatatgcctgacaacctatttattttattttcagctactggcggatttaatttaaatttacagtaatagacgccaccaaaaccaaatattggtacgtcgacactgcattttttactaatcaaatttatattatctattatattatccattttaataattaataaaccatttagttataagcttatgtgcttcaattggtactggcattaagttgtcaaagtcattatttccaccataaattctaggtcttatatgatgaacttgattttcagcccaatactcttttgattgattgccataacgctcactaaactcttttatatagtaatatctatccatcgtagtccatactggtgaagaaggaagtctagaccaagtagtattgattggtgtttctgcatcttttttagagacaggatcaacatattcaggaaaattttgaccaattttattttgtaaataaatagaactaagtgaaattggataagtagcgctatttccattatagcctaccattccccatgctcctccaacagcaaaaaatgttgtagcagctggaaatacagcagaccctaacaaaccagtagtaatattgccttcttttacaattggactagctgtatttgtagtaattgggccggacaatgatggttcactatagaattgcaattgaactgaaattgcagcaggagctggaccagttattgaatcaatataaaaattgattttaaattgtccatctacatactcttgtgaagtatgaaatttaacaactgtatctggaatctctgccaaaaaagtatatgcagagtaatggctacttgttgcattaaaattattatgaatttttacagttccattttttaaaatagggacatctttttttacattttcattctttaacttatcttgagctaaagaatgaaaattttgttcattagctattttagcaacattcttatttacatcatttagcgagtcagcctttgcatttgtattgatagctataaagcacacgatagtggctaaaaaagcaaataactttctgtatttcatgtttctttcctcattatctataatttttaacacaattataaggatctttctattattctaccatacaactctatcacataagcaagtgctcccacactgtagcatcagatgctactgggatttacactctagattgatgtatacgaagaacacaattacaatcagaataacatgaaatactactatagcgacaatttaaaatatacagtaaaatctttaaactgtatttcttattctaacccttgttcaaagcgatactgccgtaatacatattccttgaaaaacggtaaagtaaaggccacttcaccataattagtagatttgataacttgatcatctaacaagcgtctacgatagttagcaacaaaattgcttggacggtttaacctttcatgaatttctttaattgaaacacaatgttttgggctctgagccatagctaaaacaaattttcggtcttgctttgacaaactactaagtactttggtataaacattttgctttagcaccaataagtactctgatttaatacattctaaagtgttttgatctattaccttactttttttagcagctttcaaaactaaataacctagcaactgaaaggcatatgaatagcccattgtcatcaacgccattttttcaagaatttttttcgacacttgataacctgattctttaaaaactttactatagctagcttcaacctgtgagagattcaatgctgataaagctattcgctttccacgtagtaagaatgaagttatattttcgtttttcaattcagagatattttcagaaagaccagctatcattaaggctataggataaccctgccgatttaataattgataacatcttgcaaaatctttcaactcctgacatagttttacttcgtctaaggtaatcaacactttaacgtcattttttcttacttcatcaaacatgttcgttaaaatatcttgatatgttaacttactaacgtctgtagaaagcgataatccaaaattagagaaatttagtccttcaatagatttaaatgatttttttagttttgaatctgcattcagatataagctattaataaaagaaggcaacaacttcatccccatggccaaattaacaacaatccaatctggatatgcactaatctttctgtccattgctgtcaaaaagacagttttgcctattccacgcattccataaacaatcgaaattgtatatgaactatttaaattctctattccttgagacacatcagcaattagtttttttcgctgcaaatacactgctggaattcggccaaagctaggattaaacggattatccatattttgtccccaatcattttcttatcaaaaaagcagcaggcttcttacctactactcaattttatttatctttttgatgcttaaccacataaatcagtgccgcaataatcaacactgctgcaccaaccgctactgaaatttgcgtctccggattaatgaacatgaagacaacaattactaccagcataatcaaagcaaagtaatttgaatatggataaagcggcaatttaaacgggtgattctccatcaagtgtggattctttcgtctaaagcgtaactctgctagcaggatcacaaaccaagctaccatccctggcaaaacagatgaactatagacaataacaaaaacattagccaatgatttattcaaaaattgggctaacacattaagcataaaaccaacgaaaattccactggtaattccaatgatcgcatgactaggcacgattctcttagatacgtgaccaaaagtcttaggtgcttcaccttcgtgtgccaatttatacaacattcgacttgatgaataaattcctgagtttgcaccggacaaagctgcagtcaaaactacaaagttaattactgaagctgccgcggtaattcccaccttggcaaaggtcgttacaaacggtgagccaatgctatctaatttattccatggataaattgtgacaatcacaaaaattgccccaacataaaagatcaaaatccgccacaatactgacttcacgcttttaacaatggccttatgcggatcagatacttcaccggctgaaatcccaattagctcaattccttcataagaaccaacaataatggccattgagaaaaagaagcccttgagaccaccagtgaagaagccgccatgactccacaggttagaaaagcctactggatgaccgccattaccaaagccaaatagaattaccgcaaagccaagtaaaatcattaagataatcgttacaaccttgatcatggcaaaccagaattccaaggttgcataagctttcgcactagctaagttagccaccagcaaaaataaaataataattacgccggcaacccaatcagaggtgcctttccaccaaaagcgcaaatactctgttgttgccaccacctcagaaattccgacaacaatgtattgaaacacgtttgcccattcggctaaatagccggcaattggatgcacatgctctgaagcatagtctgcaaaagaaccagtacctggatcaacataaagcatctcacctaatgcccgcattacgatatacaaaataaccccaacaaaaatataagctagcagtactgaaggaccggtccacttaatggttgagctagcccccatgaatagtccaacaccaattgctcctccaagtgagatcatttccatctgtccggctgtcatcgaccgctttaattcaggtgctttcttcgccatttccaactccctttctttagcatctgtaaaaatttcctaggaaatatatctattctcatttatctttaatcactataccttatcattttttcgaacaaaactgtagctgatcgctaaaaagattgcaaataaaatcgaaataatcaaagccagctgcgttgatttgataaagaataataagattaaaataccaatgtaaaaggcaagcgtaagccagctagttactgggtagcccggcattttaaagctgcctaaattctgcttattctgtttgcgataaacaatatgtgctgccataatcatgatccaaacaatcacaaaacaaatcgttgaaacagttgagacaacggagaatatttctgctggcattaaatagtttaaggcaactactacaaataaaattaatgaagaggtcatcaaagcgttcattggaattgcttttttggtcaattcacctagtcttttaggtgcatggccgttacgtgctaatgaataaagtgatcgactagttgaaaagattgcactattagtcgctgacatagctgcagtcaaaacgacaaaatttaaaatccctgcagccgctgtaacaccgatgccggtaaagacctggacaaagggacttgaagtagttgtaatgtgattccatggataaacagacataattgccaacattgagcccacataaaaaaggccgattctaactggcaaagtgttaattgccttaggaatatccttttgcggattagctgtttcactagcagtttgacctacaatttctaccccaacaaaggcaaaaacaaccatttgaaatgataaaagaaagccccaaatcccagttgggaaaaagccaccatgattaactaaattagttagtgaaacataaccgccctttacatgcgtatgaagtaacaacattacagcaccggtaatgattaagactacaattgccattaccttaatcattgagaaccaactttccagttcaccaaataatccgacatttaccatgttaatcaacatcaataagatcacaattactaaagggccaacccattgcggtagccacggaaaccagtatcttaaataaattcctgtcgcagtcaaatcagccatagctaaactaagccagcaagcccagtacatccagcccgctacaaattcggcacgcttacctaaatattttttgattgactctaaaaatgaatgactatcaggatcggctaaaataagctctcctaaagcacgcatcataaaaaaggtgataatccctacgattaagtacgacaaaataattgaagggccagcactatgaatggctgaaccagaacctaagaataggccagtaccaatggctccccctattgcaatcattgttacgtgacgactcttaagcccgcgttttaatctcggcttctcatccataattactcacaccttcctcaaaataaaaaatggagcggcatgttttttaaatgaaacatgttgctccatcaagtttgctttttttgaattatatagtcttataccaattcatgcaattattttttatctaaaaaagatattcccttaggaatatcttcattattagtaaactttaaattggttcaacggccagtaacgtactttaactacgccaacgatactactacgcttaatggttccgatataacggctatccttagaaacgctccggtgatcacccattacgaaatatgttcctttcggaatgcgcccagtatcctgcacatatttaatctgcgctctagtaaagtattgctggtaagtccgcgcccgcatcagtgactgcatagtaaaattctgagtctcagaataaaatgtatctgagccattatcaattaacttcgttccttgtttcaaccaaggttgagcaatctttttattattaatgtagatttgattatttttgctgacgattttttcaccaggcaaaccaataacacgcttaatgtacaaagcacctggttcatctggtgctttaacaatcactacttcaccacgcttgatttgcgcatgacgctcagcgattagccgatcaccattttgaaaagtaggttgcatcgaaagacctgatactgtatcgttgctcaagacgaagtggaaaagcagcagataggcaccgatcaaaataacccagataattaagatatctaggaaaaacttaccccatgattctttttcttcttttttctcagccattatttttctccatttatctttttccacagtttacaactttatggagaaattgccaaattacaaaaaagaggtatttcctcggaaatacctcttttattattaatgactattaattagtcttcttttttgtcttcagttttagcttcgtctgaaacttctaccgttacacccttcttagcaagaacatgagacatcttcttcaagtaaatgttaatgatcttgcccatgtcttgttcagtaagtgagttgaatggaacgattgcgtccaaacggttcaagaattcaggtctgaagtagttttcaagggctgagattaacttgtcttggtcaaccttgccatcttcaagcaacttgtctgagaagccggcgtttgaagtcataatcaagatagtatccttgaatgaaacagttctaccttgtgcgtcagtcaaacgaccgtcatccataatttgcaataatgcgttgaagacttgtgggttagccttttcaatttcatcaaataaaattaatgagtatggttggtgacgaaccttttcagttaattgaccaccttcaccgtagccaacatagccaggtgctgaaccgatcaacttgttaactgccatttcgtcttggtattcactcatgtccaaacggattaagtgttccttgttaccaaataattgaattgccaattgtttagcaagttcagtcttaccaacaccagtaggtccagtgagtaagaatgaaccagtaggtctgtcgctgtctttgaaaatttgcttacgagcaatagcgtcagtaattacatcgatagctctgtcttgatcaataacattcttcttaagtttcttagctaagtccaagttcttttgagcttcatcagcgtgaagttcactcattgggatcttagtcttttgttcaataattgcgtagatgtctttttcagttacttctggagtattcttagaatctacattcttaagttgtttctcaagttcagcaatcttactcttaatttctgaagccttgtcgtaatcctctgccttagcagcttcagtcttcttagcttcaagagctgagatttggttctttaagctcttttcatcagttgattgtacaagcaatgccttcttagcaccagcttcatccatcaagtcgatagccttgtctggtaagtaacggccttgaatgtatctttctgataattcaacagctaatttaagactgtcgtcactgtattttacgtggtggtagtcttcgtacttcttctttaagccttccaaaatcttaacagctacatcagtagatggttctggaacttgaacagcttggaatctacgtgataaagctggatctttttcaattctttggaattcactagtagtagcaccaattaacttcaattgaccacttgccaaagctggcttcaagatgttagctgcatccccattgttgttttctgaatcagtagaaccagcaccaacgatgttgtgaatttcatcgatgaataaaacaatgttaggatcgctcttggccttgtcgataaccttctttaatctttcttcaaagctaccacgaagacttgaaccagcaaccatgtcattaatatttactgaaatgatatgcatgttagccattttagctggtacattacctgaagcaattctttcagctaaaccttctacaatagaagtcttaccaacaccagcaggtccgattaaaacaggattattcttcttacgtcttgaaagaatttcaattacgttatcaatctgttcgtcacgaccaattactgggtcaaatttattgttcttagcttcctcaactaagtcaacaccaattggcttttcattgggttgttgtgggttctgttgaattgtttgtggtgcagcacccatgctgctggagtaattaattggaattgaacctgaactgcctttgctatttcttctgctaccaaagtcgtcattaaagaatgagctattcaattcgttaaataagttatcaaaatcattgtcaaagtatgccatatgtgcaacactccctatctcaaatttacgtctttagcactctagcttatcgagtgctaactcattacatttaatagtatagcaggttatccacagactgcaagctaaaaaacaaaagttttacacattttcctttatttttgtgatttttatttaaaaaagcactacaaatgctgcaatataaacatttgtagtgcttcacaaattataaagaatttcttaagatgggcaaaaattgatgattattttgcttaaaactgttgaattttaaggaagttttccacagataagaataagtttattaccataaactatttctgcctacctctattattgcccttttgcttgtccagtattttgcggttcgctcaactttctcggcccaagaaaatactgtttaattactttgattacctgcttattctgaggtaaatccgagtgatccgcttctacacccgttactgtcattgcagtatagctcttgacttgattctgaaaaatatattttccggctgctacgctagcttctggtacaattccatcagactcataattttttccaccagataaggaataaacaatcaagtttttcggtagtttatctttgttcttgataaagttttctagcatttgcgttttatgattaatatttttttcaccaaaattatatggcgttcctagcgtcatcagacgtttgattttaatttcatcagaatagtaacagtagtaatgttctaaccaataggtccagatcaagccaccgttagaatgcccaaaggctttaaaattattaaacttatagctctctgataaggcataaaaggcttgatcaaaccagctggcttgcttcttaatattgctataaccatcgtgattattttcaaaaccgacaataatgaaaggttcgttgtcgtttttattaattttgcctgaatatgacagcgttccattcgttgaaactttaattttaagcacgctatgcttagtcggtgtgttctgatttagctgcttcactaattggttaaaacgttcagtcgttgcactagaacctggaatcataattactggtgacaaaagcgatttgcgtctttcagctctagcgtggttatcagccttcatccaagaataacccggaatagccaaagctactaataagactaagacgattgccaaccatttaaaattaggattttgaactaaattaatcatttttttcttcataatcctttagtcccctttcaagtcgcaaacctaatttcatagttggaataaacattattatatccaaaatgaataacaaaatagaaaataccaagttgctccaatcaccattggaaccaaagaaagagaccaaaattcctggtgtcccacttaaaacggggtaagcacaaggttgaattaaatggcaaaaaattgctccagcggctagtagaatattaataattggaataatcacaatcgccggcagtaacaatggatttaaaataatcggcatcccgaccatcatgcctccagttgagcccaaagctgctggaagcaggttaaccttggcaatattttcactatccttatttttactataaattaggataattacaatcatcgctaaaacaatactcgcaccacccatttctgcataaggataaaacaaagaactacccaaatacttatatggtacattccaagcactcccatgttttaaggcaaaatttaagttagctgctgctgaaatactattagaagtagttgacaaagaagctagaggataacctattcccatccagctaagtaaaaagactgggatagtcagtaaagctattaacaaaatattatttgattcctgtatttgagtaactaggcctttaaaagtactagaattcaagaatttgatttgaaattcataaattataatccccagaactatcccacaaaaaattgcaaatattgtcgggataaacgcattccaggctctttccttaattctagcggcatgttcaaaatcgactggcttgtgttcctttcctagccaatgaaaaatttgccctacaccatagccaattaacaaggccagcaagacagcattaatttttaaaacactggaagaaaatggtgaatgatcgctggcattattagctaaattattggcataagcacaaaacatgataacgatgacagccgtcatcccggccatggttgaatctttacggtataaacgcgcagtataacgtgccgcaaaataagccgcataaataccaaataagccgaaggttacccgaaccatcccccgactgacaaatgctcccgcataccaaaaacgatctggcaaagtgatatcaaaattaaaaatattgtaaataaaactatcgggcgaaaaaacggcatctctgaacaacttaaaatatgccccaattaccgcgatcggcatcagcataaccaacgttcgctgaaaaattctaaagattgccaatcttcttagtttaagaaagatatttgtgattctgtttaccatggtattttcctttacctatctattctaaatatgattgaataaagttaattaaaacaattattaattatacatctatactagaaagctgattatgatggcttacattaacttaaaaaataatactaaaatttaccaatctggtgacacaaccatctatgccaataagaacattactttttctatcgataaaggagaactagtcattattctcggctcatcaggagctgggaaatctactttgcttaatattttaggcggaatggaaccaaatacaagtggcgatgtaattgtagcgggaaaaaatattgcaaaatataacgctaaagaattaactacctatcggcgcaacgacgttggctttgtttttcaattttataatttgatttccaacttaacagcaaaagaaaacgttgaattagctgctcaaattgtccctgatgcgatgagcgccgatgatgccttgcagtatgttgacctagggcagcgagaaaacaattttcccgctcaactatcaggcggtgagcagcaacgtgtggcaattgcccgagccatcgctaaaaagccagccttacttttgtgcgatgagcccaccggtgcccttgactataaaacaggcaaacgaatcttaaaaattttgcaaaatatgagccggcaaaatggctcgacggtcttgattgtaactcataacgccgctattgccccaattgctgataaggtcatccgtattcacgatggaagtattcaaaaagtccagcataatctacatcccgctgatattagtacaattgaatggtaggtgggcgacatgcaaaaaactattctatggaaagatgcttggcaagcaatcacccattcacttgaccgttacattgccattattctattaattgcactggggacttttgcctttacaggtttaaaaatggctggtcctgatatgcgagcaacaggggcagaattttttgccaaacataacttagctgacgtcactgtcacttcaaactatggcattaattcaactgatcgccttactattcagaatttaccggaagtaaaagaagctacttttggctattttcaagatgttaaaattaaaaatcaacctgatacgctccgcatcttttctcaatcagataatctttcaagttatgaattgattaaaggtcattttcctaagaataaaacagagattgcactgtcatatttattgcagaaaaaatatcgcttggggcaaaacattacttttaataaacctggcattttaaaaaataagacttacaagattgttggcttcgtcaaagctagtgagttcttagataaaaatccaatcggtcaaaccaacattggcagtggccatttaactggaattgcggttgctaatcataacgccttcgccgcaccagtttatcaaattgcccgaatcattttcaaaaataccgccaatttaagtccctttggcatagcttaccgcaaccgtgtttataacgatcaaaccaaattgcaaactgctttaaaccaaaatcgagccgacaaatatgacaaatatcgggccatgtatcaaaagcaatatcgacaagctgcagctaaacaattacttaaacgtggcatcgtagttaacccggcgcaaatcaaagtaccacagaacaagcttaaaattgcttatcctaactacgtaatcaacagccgtgaagaaagtcagggttatgcttcttatcgagcagattctgaacgagttgaagttttggctaatgtctttcctgttttcttgtttgctgtagcggctttggtcagcttaactacaatgatgcgttttgttgaagaagaacggactaatattggtacgctaaaagcactaggctatggtaatggagcaattgccattaagttcttgctctatagcacctcagctgcaattttaggtgttattctgggggctagcttaggttacacctttttgcctaacttaatcatcaaggcctatttagctagctcaaccttaggaactgattaccagctgaattttgcttggggaccactattaatttcattgacgattgcactacttgcaacaaccgtcgtttcaatgattactttagctcaaactctgcgtgaacagccttcagctttacttttacctaaaccacctaaaaatggttcacgtattttactagaatatattccatttttatggaagcacatgagcttttcagctaaggtaacagcccgcaatattttccgttataagagcagaatgctgatgaccatcctaggcgttgctggttgtactggattactagtaatgggatttggtattcgtgattcactacacggaattggcaatattcaatattctgaagtacaaaaaaatgatgtcatcgctttgaaaaaccgccatgttaacacgactgagcgacaaaaattaaacaaaatttttaccagccatgatgttacgcaaactactgctgtacaatatcaacaattgactaaacaccttgatagcactggagcaactgaaaatgtaatgctaattgcgccacaatcaactaaaaactttagcaaatctatcaatttgcaagaacgtcaaagcaagaaaaaacttgttttgtcaaataatggtgtagtcatttcagaaaaattagctactatcttgcacgctcataaaggttcaacaatttccttaaaaaatgaacatgggaaactacttaagttcaaagttagtggaatctgcgaaatgtatctcggtcactatatctttatgagcccagctgaatatgccaaagaaactggcaaaaaatttactactaatgcctatttagtaaccatggccaaacattccccaggaaatatcagccatattagtcaaaaaatgatcaaaacaggcgcaatcgaaacggttgtctcaacttcatcaaatagaaaattgctgagcagtttcactggtagtctaaatgaagtcattctaatcctaattttaatttcagggatgttggccttagtagtcatctataacttaactaatatcaatgtcgctgaaagaattcgcgaattatcgaccatcaaagtgctaggattttacgataatgaaacaacgatgtacatttatcgcgaaacaatcatcttatcggcactaggaattatcgtaggctttggctttggttggtggctacaccactttattatcactagtttgccaccagatgtcgcgatgttcgatccgaatatgtacccgttgaacttcgtcttctctgcgctaattcccgctattatcaccgctattttagcaattgttgtccatcacaagatcaagcgaatcaacatactagatgccttgtcctccattgattaagcgctgttatgctataataatcactatagaaaagggtggaaaaaacatgccaagaaagcactttgaattaaacagtgatgttaataaattaatcgaaaaatatgatgaaattaataatgttgatttcaataagttagttaacaaggccttaagattctaccttgttaatcaaatgaactacaaagatgttcaagacgccctgaataaagctgataacgaagcttctaagtatattgatgaagcaatgcgttccagcatgggtgatattaatcgaaattattagaacataactaatcatggaaaaagccatctgttttgacagcaggtggcttttagtattcattacaagataatttattataaaaacaactaattgataatttctttactcaaaatgcttataccgataatatcgataacctatctttttaccaaaaatcgtctccgaagttttcatccaattagccagcaaaacataaatgcctaaaaagactaaaccgaagattgctaaataaccaaaactaccaacacggcctaagtcgttgaaacgatagccaaataaaatttggtaaacaaagagcaggataatgtaaatctcgtttgaaacaatgatcggcaacaaactccccatcttaacgccatatgtcttattaagcttgtgataactgagccaaattaccagtaagaatgaaatatcagttgaaagaattgcaccatccccattcatgaacatagtcatcggtacttgcaaaattatttttactaagacaccttcaaccatatagatcacagccagtttgttcatgttcaaagctaaaagcagtgttaatgaattcatcaccaaaccagcaaacaaactttgaacaatattttcaaccaaataatacgcacctaaactatcgtgtgagaacaagaccgtataaattggagaagccgcaaaagcaccaagtgcaacaaccggaagcaagacaaataatagtagtctatagttctctaaaagcagctttctaatgctttcttgactatcattagccttatacttaagccctgctaaaagcggcagactagtctcagaaacggctgtcgcaagtgaaataatcaccgtggtaatcttgcttggattagccgagaaaattgtgtacaagtaactaacatagcttttactcatatgactgaagctaatcaggatttgtttaaacaaaagttgatcaactaattgcgtaacagtaatgaacgatcccagcaaaacaaacggaattgaggcataccataagttaagcaaactacgagaaacattattaagtgctctgggctcgctattttcaattaattctcggtaatgtccccactgcttgcgcatatatgcaaaaagatacaggtaactagctatagcaccaacacaggcgccaaacacactgaaataaaccgccgttacgtaatcatgatggaagacttcaataatcaacaaagtagccagcaaaataaacaaaattcgagcaaattgttcccataattgggaaatcccatatggcttcatatcattatttccctgaaaccaacctcgaaccatactcattgatggcagaattactacggctggcactaatactcgaatagaaattgttgcactagccactgaatccactggactatttttggcaatcattggtgccgtcacataaagcaaaataccacacgctattcccatgaccagcataatagcgaagcctaatttggtaatgtacaaactgtctttatatctattttgcgaatttaattgcgatacttcccgggcaataactgaaggaagtcctgccgtcccaattgataaaaacagcgcatacggcgtatatgacgaattgaacagcgcctgtgcgtttaattggttgtggtagcttcccagcataattagccaaggaatcaaataaacaaccccgagaattctagatacaatgctaccaaacgatagccaaaatgaaccggataggatttttttattcaatagaatagcctcaaatctacgttagtttctcattgtgccttcttattatacgtggattttataactttgtgggaaatatgtaccaactagttacccttttttaacaaatttttcggctctaataatacaaatcagttacattatttactatattgttacccagcctttaattttacgttagaccccttgacctaaccttctttaattattatccttaaaatgtttctgttaaaggtcataattagacaaaaataataatgtattaagaatattcatcgggggaattaagttgtcattcaagaaaaagattatcactaaattagcttatgttgctatgctttcaactactggcgttgccgcagctgcaatcgtgcaaccacaagcacatgttcaagcttctaccacttcagttgctgctcgctcactcggaatcgatgttgctagttaccaaagtgctgatctttcagctcacgctaaaagcggtgctaagtttgctgttgttaaagtaagtgaaggtaccagctacagaaatcctaaggctagtgctcaaatcgctagtgcccgcgctaagaatatgatgccaatgggctaccactttgctacattttctgctaatagcgctgctgctaaaaatgaagccaactacgcaatcgcatcagctaaggctgttggtcttggtgctggctcataccttgcatgtgactatgagtcaggtgacggcaacaatatctatggtggtaagaatcctactgctaatgcaattaatgccttcatgagcaaggttaaagctgctggttacaagccacttctttacgctagttcatcagttttaagaaacaacattaacactaactctgttgttaacaaattccctaactcattatgggttgctgcatacgctgtttcaggtcgagtagacaatcctaactttgactacttcccatcaatgaagggtgtttcaatttggcaatttactgacaactggcgtggtcttaacgttgacggtaacattaacgttttacctcttacttcatcaggtagcgctgtttctcaagcacctaagaaggctcgcgtattaaagaagaaggctcatgtatataacaaggctggtcaccgtacaggcaagactattaagaagggcacttctatcactacccatggcaagaagaaaactatcaatggtaagaaatactacaagattgccaagaatcaatacattagatcagctaacctttactaaaaaggcaaaataagtcatcaaaaaatgcaccaggtagaaattacctgatgcattttattttatccaattttttacttggcgaattgttcaccagctaagttacggtagaagttagccttagcttgacggtaatatgggttaacccacaataaaccgatcccgcaggaaataataccaagtagccaccagccgatgaaacttaaatcaaaaataaacaagtccatcttatggccatccatcaacttacggctggcactgatagcttctgtggcagtcggctcatgaccactatctagcatgtcacgcaagatatatggtgtcactgcatatgaataagccttgatcagccctggaataatcagtaaccaagtccacaaaataagaaaaatttcatataaaatataagttaaaaagttactcttaaagtttctggtaaatggactaaagatacctgaaagaacattttccttagtaccactatctctaaaatgcaagatagtataaattacgccccatgtgattaagccaattgcaactgaaactaccaaagtaatcagccatgcaaaaggattaactcttactttatctaggtacatcaattcagcattgttaccgaagcggcggacaataccgtacacgatatcttcgcccttttcaaaaaagttttcgatatcggtcaaaatataaacgattagccagccaacaaatgacagcaaaactgcccagccccagttaccacgtaactggtctctagcttgttcttttaattcttttcttgtagtagccattttctctcctcctcacttttctaatcatgagtattgtcgcctaaaatcagggcagaatcaattaaaagcacatcaaaaaagcctaattccaccaacatcggaactaggctcacacagtgttgaccgccactctgaccacatatagaagataacattttcgctaccggagaaaatgactactcatagcgacggtacatgatagattttagcattcaactacctaaaagacaagcgaaaagacgtgttgaattagcggaatggataccaaaatttacggataaaaaagacgaggtctaaacctcgtcttcttcattactaaaattcaagcatcatcgtcattgcacgattgatcttctttttaatctttttaaactcaccagaagcagtatgattatcctgcaaaatgatcatgttctggccatctttagttgcccgcataaaggtataatacccttcaccagcaccattagcagctttataatgctttaaattataaagtccaccattataatagctaggagcctgacccttgaacagaacttttctactcttgttagtcaaaatcttaccagcaagaatatactgcatggtcttagctaaatctgcgttagacattacgattgaaccagcacccagctcattgtgagcatccttaacggctttagcatggttcactttgacatattcaccctcacgcatttcatagcctggtacccaatgactagccaataacttagccttgtctgaccacaagaactcactatgggttagcttcagtggcttgatatatgtgtcatggaacaattgctcgtatgactttttctcaagcttggacaagattccacaaaggaaaatatagtttactgaagtatagtgccacttacctaatttgctagcatcaaacacagtatattgtgcatcatgcttgatgttcgcttcatcagagataaactcaggcgtacctaattgttgaccagctttcaaatccagccctgatgtcatatcaattaagttgctaatcttgactgaactagcaccatctacatttgggtagaattttgaaagtttatcgctaagcttcaactttcctttctctacctcatgcatcaccattgcagctgtcattgacttttgaactgaattgatcaaatagctagtgtcaggtttattgtccgtcgcataattaagcaaaactttgccatgatttattactaaaactgagcctttaacgcccacatggtcaatagcctggcgcactattccgcttttaaacggtctttattgcttaaatcaactcgtttaacgttatccttgttttgccacttcttggagtagaagtagttagacatatcatagtcataacgcttattaggttccttcatgaatggacgaacagcttgatcaactgcaacccagcctttccagcctaggtgaatagtatcttgcataaagtacttttcattgcctcgtcttgaaagatctgcaatattttcaaagccttgactggttaactggtgttccatcttagcaacagactcttggtacatcttgctagataaaccagtgtacttcatccacttgccattaattggtgggatgataaatagcacattagtgtgttgcttagcaaactgctccaacatcaattggaaatcaccatattctactgaatgtacatagtcaaaatcacgctgactacccttcaagcgtttcaataccttctttggtaaacgtgttctaaagaaggtattatcaatacctaagttgtttgagttagtgtgtatagcagcttgctctgctgcaaccttattcaaagcagctacagaatacttgttaggtaaaaccttagctctcttttgaatcttatttacacgatcacgcaattggaatgagctgaagaaattatcttcgttacgcaacattcgacgacgattttgtaaataaaatttttggaagctagtcaacttcttgccttgagcaatttgcttaaggctattcttgatctcgccctttacatttggcatttccaacagacgtttagctgcataacgatcagttttattattcttggcactaagcaagaaattacatgcttgcaatggtgaataatacaatgcaaaggcattaggatcttgaccccgcttagtaaaccattgtggtgaaatgatcacaacagccttcttgtttctaagctgcttagctgttccttgcatccccaagaactgagccaaagattgactacccggtccacctaataagaatggacggtagtttctatgatacttttccgcaattacactagggtgaagtgggtcgaatcttgacaactcacttgaaccatagaatggcacgtagccatcttcaaaagcttcctgcttcattgtgctgcccttgaagacagttgtgttttgtgaagctgcagcctcgtaaatcgtttgcttagaaaaagttctttcccaaggaataaggaaaacaactaacaaaaggataaaagcgcaaagaactgggccaaagatttgccacagccggcgtttattactcattttctaagctttccacctttgccacaatcttgtttggagtgtcccattcttcacggttaaattctgaaacaggaacatcaatatcaaacttttcttgcaagttcaaaagcatttgtacacttgccattgagtccatcaaaccattgtcaaagatgttttcatccatttggtctgataaatcttcaccagttaagtcatttaaaatatctaatacgccttgttttgtatccataattaatacctctcaaaaaacaactcaatacttattctacttccagccgaaccacagttgacttaggaaccctgagaaaatcaagaaactgaaacatactacattgaaggttaagaaaatggcgaaccatttagtaaacttgttagatggaatttgcttcttatgctttctcttgaatctaagccacatatcgttgatacaaatagctgaagcatggaagataccataaacaatataataccacgttaagccatgccagaaacccatgattaagaacaacaggaagtaagaaacttgtgataatctaattcgattcttaaacattttcttcttcattgcaaagaaagtgaatcgcatgtagatgtaatcacggaaccagaatgataaagtaatgtgccaacggttccaaaaatccttaatgttcttagaaataaatggcttgttaaagttcattggtgtatgaattcccataaagtatgagattgatacagcaaacaatgagtaacctgcaaagtcaaagaacaggtacatactgtggcaatacatgtaagctacaagccaccatgatagcttcaagccgccatttgcattaccaacggctaaagcagcagcactgatctttggtaacaaataagtgccaaagaaccaaccaatcacaaatttgtataaaaagccttggaataagtatctaacagcatactgcatatctgtaatgtatgcatcacgcgtaggtaccttatcataatcttttttaaatctgcggtaacgatcaataggacctgacgaaatagttgggaagaaaagcaagaatcttgcgtaagtaacaggatctactttcttaattgccccatcacgcatttccataataacttgtactgtcttaaaggttacgtatgagattcccaagaaaccaatgacaaagccaattgagttatcaggaaaagcggtcaaatatttaactgcggctaatggaataattgccaaaatcacagccaaactaaagatccaagtcttatttttaccgtggtgacgataatactgataagcaaaggttaaggcaaattcgtaaaccaaccagattaataggttaaccccttgctcccagtgatcaccatcaaaaatcaagaacaagaaaacaattgaaaaaattgcttcatatgtcttgagtcgatgaccgtaatatagcccaatgataattggaattaaagcgatcatcaaatagatgaaatattgcggattagaataaggctgtaagttaatgaaattaaaattcactacttattaacctccttaattaccgccttaatatctaccttaccattttgtgaaataggtaatgcatcttggtagatgtaacgctgtggaatcatgtaaggcattatattcttagctaagtcttcacgaatcatcttagttaaagcagcttcagaatactgacgacgaacgccttcttttaattcgatttcggcaacgatctgcttaacagtgtggtccttattgtacttaggagcagcaacgccataacggacaagcttgttcttagttaagtagaaattgatttcttcaagttcgattctgtaaccattgaacttgatttggaagtcaattcgaccgcgataaaatagcatatcgccatcaaagaaaccagcatccccactccggtagctacgatactcagcaccatcttcatggaaaaaggcagcttcggtcttttcaggattgttcatatatcctttagaaacactaggaccactaatgataatttcaccttcgccaggcttatcacccttagaagtatcaattgtaatcttagtgtcttcttttaccttaccgattggcaaacggtcatactttttaagaacttcatcagtaatttcaacttgagtaacagcaactgttgtttcagttggaccataggtgttgaaaatatgactatctgggaacttcttcttaagcatctcagcttcactgtgtggcaattcttcaccacagaacaagaaatgacttaagtctggatggtgttctgcatcaaaagtcttgtccaagaagcacatctgtgcaaatgacggagttgatacccaaacattgaactgcatctttggcaaagtttggaataatttaccaaagttttgagtaacatcatgaggcaaaactaccaacttaccagcagaaacaagtgctggataaagactcattactgacaaatcaaatgagtaaggtgcttgtgccaagaaacttggatgttctggcaaattaaagtctgacaactcccagttaacgaaactaagcaaattgtcgtgactaatttgtacacccttaggtttaccagttgtacctgaagtaaagataatgtagtagttctcatcaccttcaacgaagttcttctcgtcaacttcaaaattgtcgtcttcaacttcgctagccttaagaaccttaacatcagttaaatcaacttctggtaacggatcaatttccaaaactagtggtgacttagaaacgtcttgaatcatcgttaaacgttctgcgttagaatagctagcaattggaatataagcgtgacctgacttaacacaaccaagaaaactagcaatcatttcaaaagtttgtccgccccaaatcataattggagcatgctctggaatatctaagctagcaattttatgtgcccacgcatttgaacgctttttaaggtcaccatatgtattagtttcaccgagatagtcgtaaacaacacgatctggttcgtttgcggcgatctcatcaattttcttaataacatcttgaatcatgtgatagcacctaccttaaaattcattataaatgaagtgaacagatgttagtccactatattcatataaatagataagagccatcaggattccgaaataaacaattgttttcaaaacaaacataccaatacgtctgcctcgagaatcaaccttcgtctttttattcattttttctcctttaggtaatcttacttttgcctttgccctatattactacaaatagtggcaacaaacgcactaacggcttatattttaacaaatttaaactttttcttaaatcttcagttatttgtttcaaattgcgaatgcgttttctttactgttgtctcttgcaatcccgataagcaaaaaataatggaataaagataactattgccacaaaaatcaaagcaaagatcattaagcgccatacattctgtggtttagtccacattttactctttgccgtcgccaacaaaaatgccgcaaataaagcaataacaattacttcaaccaggcaaaaaattaaatgagtattttgccagagatataagtaggttgttgccggaaataaacaaaaccaccctgaaaagcgtaaaagaaagatttcttttttacgataatctactttcattatagtttcctttcctcattaactgccaaataacgcattaatattcaccgacaaaatccggtccataactacaatttctggtctggcgtagatcttagagcctgattcaaacacacatagtagttgtcccttataagcggtaatttgctctaaatatggcggcatggtaattaccagttctgcattcttttcgtctaaagcatttaaagctgaagttggaaaaacgtagagcttggaatcaccactaccataagattggctcaaaaaaattttattttggtaaattgcaattccttgaatttgcttatccattgaagtttcgccagttggatcggaccattgcagcgttccggtaacagatttaacttcattattagtaattgagccacgatttttaccactacgcgctatagtgtaagccgcaacttttcctcgaccatacatgttaaaaaagccaacaaacaattgaccatcataatatgtaacggtcgatgctttttcaactgcaggaatggcaatttgatatttatacttaattggtatttggctgccctctttataggcccttaattctgccattgaaaatgctgctagcgctgaagatttgcccattgagccagttatccagatatttttggctactggatcataagcaatcccacctaggtgtggccgaccaggtatttgaatcgttttaagatatttgcctgtcttcttatctaagacataaacaaccgaagcatgctcatgttcaccatcataagcagttagcaaaatatacttacctgcaaccgtaatcccctgtggtgtcattgcagttgctgtattgacctttttagttttaaaatcataacttttagtagcaactaatcccggcaaaacaaagtcttttccatcccacgtccgcggtggtacataattggcaactttattaataaaaggatatttttcacgcaatgctttttggtaattggcaaaattatgccaagcaggactagtgcttgtcccatccttagcaattttttcttttggccgttgacggatcatctcctgcttctgccaccattggtaaccgaaatagcctcctgcaccaatccctgcaagcaaaagcagtactagcaggaagcgcaaaattcttttaccaatttttttcaaaaaattactcccttctgtttaggaattgtccctattatgcaattcattataacgaaaaaacaattactttttgtttttaactccttgctataagctttatttactaaaaagataaatttttttgcaaaaaagtgctttcgtcacacttttttcacaaattaaggttatacatagtaaatgtagtgaggaagaataatcctctactacaactcaacttttttgtttttcattcatactcctccaagtaaataatgaaaataaaaagaattgacttactccaattagtcaatttcatatctatccctttcggctcacgtgcgttgcgtgagcttttcttataccttaacttattctcaagcaaatctttaccttttcataataaattgaacacttttacttcacatttacccagtattatataaaccgtagcaagatggtagaaacttgctacaatactcccacttttttatttcattcattcttactcctccaaagtagatgaaactaataaggtccgcaaaaacttgcgggccttttcctttttcagcacttttttctgtataattaaggtagaaatgaggtgccgctatgttttcaccatcaatcaaacatttaatagaagaaaaatctggttcatttttaatccctgctagccgaattgcctttgtccaagcagacaatcctctttatcatgcctttttgattttgactaaggttaaatattcaaaaattccagttttagataaagaaaaacgagtcgttggcctgcttagtttggaaatgattacggacaagatgctgacgactgatgagatctccactgcccctttagataaattaaaggtcgaagatgtaatgcaaactaagtttgataaaataaacttcgttgaaaccaccctagaaacgcaactgcatctgttaatcaataatgctttcttgcccgttgttgatgatcgcggcgtgtttcagggactacttactagacgcgaatggattaaggcatttaactatgtagttcacacttatgacaaacactacgaaacaaaacgaataaaataacctccaagcagcctttaaggctgctttttttaactccaacatttattgagcaaaaatgtgtccagaccaataaagaatgttagaattaagcggtagacagatatgtttgtattttggggagggcaattatgaaaaatttaaaacgtcaatggaagtttattgtcgttttgattgctggtgcagttggattaattagccaatttgcattgcattcaaagagcctattctcaatcgggaatcttcaatttccagttcatgccatcattattgatatcattggtatcttgatggcaatttctttactattggaaattttccacgattggaagacaggccgttacggcgtagacatcctggctgttatcgctgttgtttctaccatattgattggtgatgtatgggctgaatggatgattttggtaatgatgaccggtggtgaaacgctggaagattacgcaactggtcaagccaacaaggaattacgtgccttgcttgataaaacgccacgtatcgccaacaagttagttgacgggaagatcaccgaagttaaggttgatgacctgcaggtcggtgatactgttttgatcaagccaggtcaacaagttcctgtcgatggtcaaatcgttaagggcacttcaagcttcgacaaatcttcattaactggtgaatcagttcctgtgaccaagaaccctggcgacgaattaatgtccggttcagtgaacggtgatgtagcggtagagatgaaggtaactaaggctgctaaggactcagaatatcagtctattgttgcgttagttaagtcttcacaagctcaacctgctaagttcgttaagatggctgaccgttacgccattccgtttaccgttatatctttaattattggtggtgtcgcttgggctgtgtctggggatgcaactcgctttgcggaagttatggttgttgcttctccatgtccactgttgatcgctgctcctgttgctttggtatcagggatgagttcaatgtcagctcaccatattattgttaagtctggtccaaccctagagaagttggctcgcgctaagacctttgcttttgataagactggtactttgactgaaaaccaattgatcgttgaccaagtcgttactgatgacaaatcatttgatcaaaaagaattgcaaagcttagctgccagtgttgaacaacagtcaagtcacgttatcgctagttctctagttaaggctactgacaaggatttaattcatcccgtaactaaccttaaggaaactaccgctcaaggtgttgaaggtgatgttgatggcaaacacgttaaagttggtaagttatcctttgttgcgccaggtcatgaaaaattaaacgtcacttcaactgctgtttacgtttcagttgacggtaagtttgctggttacatcactttgaaagataagatgcgtccagagagtcctaagactattgaacgtcttcgtcgtcaaggtgcagaagatatcatgatgcttaccggtgaccacaagcaagtcgcagaaaaggttgccaaagaagccggcattactgatgtccgctcagaacttttgccatcacaaaagattcaagctattaaagatgtgccaaagcacctacgtcctgtcgttataactggtgatggtgttaacgatgcacctagtctgaccgctgctgatgttggtattgctatgggtgctaagggtgctactgctgccagtgaaagtgccgatgctgttatcatggttaacgatatttctaaagttaacgatgcagtcgctatttctaaacacacaatgaaggttgctaatatcgatgttttaactgcaattggtgtcgttattatcattgaattgattgccttcactggtgttatcccagccttctggggcgctattttgcaagaagtagtcgacatgattacgatcagcttaggtttacttgctaagactaagccaagtgataagcaatttggtttggaagaaaaatagattagatgtgaagaagctccagaatcgatttggttctggagccttttttcatacataattatgcgtagcactgcaccagttcaatttgcatctaagttaaaaaactattaagattaaactcaactaaataatttttagtggttgggtttttatcacaataaaaactttcaagattcgcttctttgggtcaggaagcacttgaaagttttttgtttttttacagaaggggaaaatatgcattttttaggacaacttatcttaatcctcttaactacagttttgctggggcaattattcgcccgcttcaatatgcctgcagttattggacaactattatcaggaattttactgggaccagctatcttaaattgggttaagccaaatgatatcatcagtctattctccgagttcggggttattctgctgatgttcttagctgggcttgagagcgatctagatttattaaaaaaatacttcaagctaagctttactgtcgccacagtcggcgttatcctacccgttgttttcatgggcttagccagttacttctttggcatgcgccctcttgaagcactctttatcgggattgtctttgcagcaactagcgtttctatctccgttgtggtgctgcaagaagcacaccaactgcacacccgtgccggcacagccattttaggtgctgccgtagttgacgatatcttagccgtggttgttctgagtctattcactacattcagtcatgaaggtggcaagagcggcttaactaataactttttgcttaatatcttgattgaagtagtttacttcgtagttgtttggctgatttttaaatttgttgcgccatactttatgaaagcttctgaaaaaatcgacgttgactattccgtcgttatcggttcattggttttagccttaaccatggcttgggccgctgattttgttggtctttcagctgttgttggtgcatttttcggtggtttagcaattcgtcaaacaccacaatacaaagaagttcactcctctgtttccgcaatcggctactctgtcttcatccccgtcttcttcgctgatatcggtctttcaatgacttttgccagctttttcaaggatatctggttcattatcgttatgaccgttttagctattttatcaaaattctgggccggaaaatactccagcgaaatctttggcttcaataagaatgaaggcaatatcgtcggtgctggaatggtatcacgtggtgaagttgcactgattgtagcgcaaatcggaattaaccaccatctcttccctgaggatatttattcaagtctgatcctagtaattatcgttacaacagttatttcaccatttattttgaattactttattaaaaagagtcaaaatagtacggaatttatgtagaaaaagtctagcattcgctagattttttaatagtttaattttacaagtggcttatcataaacgcaattgtgtctacatggtaaaatcaatagtgagaggtgagaaatatgttacaaactccaaacaatattagagctgttaccgctcgtgacctgcgcaataattttaagaaaattgctgatgatattaatgactatgatactaccgttatagtagctcgtcccaaagataaaaatgttgtgattatttctcaaaaagaatatgattcatggcaagaaacttcatatcttctaggaactaaagctaaccgcgatgcattagctgaagctaaacaatcatttgaaaaccaagatcaacgaaataaagttttaaccccagaagaattcgaggctttaactaaagatgacgaagcttaaccttaattttaactacaatgcctggaatgaatatcttgaatggaaaaaagaggataagaagacttcccaaaagattgataattttattaaagaatgccaacgccatccttttactggaaaagggaaacctgagccattaaaagcgaatttaagtggtgcatggtctcgacaaagtaatcataaagatcgcatggtttattcagttaccacaacagaattacaaatatggcagttaaaataccattattccaaatgaaaaagctctttcgagcttttttgtttaacccaattttcctaaatcgattacttggtcatacttctgcaactcatttgattcatagtggtgaattacttcaataaaggtaaggtttgagtttaacaagtaattatgaatttgatctgatgtcttcttatcaagggatgcattaatttcatctagtagcaaaatcgatctatcggccaaaattgcccgtgctagttctattctagctagctgtcccccagacaattgatccgcattatcacccaaggaatagtcccagcccttttcagcaataatttgatccaaacctaatttttggcacacctcgctcaccttttcccgggaaatatttgcacctaaagttaaattaaaccacaaggtatcggcaaaaattactggggactggctagcataagcgaataaatctgtaaacgagcctggcttttgctttttgtcgttaagcaatatttccttggcatgaccatgctttccggttaataggaattgtaataacgttgatttacctacaccagatggtccaataactgcaactttttgaccttttacaactgcaaagttaatttgattagctaattccttgccttttctagtaagatccagatcttctatttgcaaatttgcaaaattataattggtctctttcttttcaaccttgcccttggcaatatatttttctgccttagcgacaattttcttagttgttgataatttgtttcgatcttctaaaatagtcaaaattggattaagaaatgaatttgacagttgaacgattgcaaataaggcacctaaagtagtttgacccttaaccaccatgtaaattcccactaagaatggggttaagaacgtaaataaactagcaatcaagttaatccaagaattagtatctagattgagtaagttcattttacgcaaagcatcttctaattgattgatcaaaacttgatttttcttaaccgcattatcgcgcttgttgtataaatttaatgttgtgctaccagccagaaagtttttaatatgactaacatatttatcattagcagttgtccaattttctgctgcagtttgaatcttcttttgaaataaattagaaaccagcatcggcaaacatgaaccgattaaaaataataatgtaactaaccaattaacacataaagcataccctagcgcaaaaacaatcatataggcctgcatcattatttcaatttcagcatcaaaacgattagtttccagcagcttaaaatctgtagtcaaaaagcctaagctagcagtattttcttcgctagtctgacccagcatcccctttaaaatgccagctcgcagcgtcgtattagtctcttgaatagcacttgtttttaaccgattgaaaatcagcgaagcaataaaagtcgcaataaacgccccaataacaataactagaaattgtgctaaatcgccaaaccttctttgcgtaccaacattggtcaatgtctgtaccatatatgcaaaaatgatttgttgtgtactagcaatcaagcctaaaatagttaacataatgaattttgcatgtgaagaatatttgtaaatcattttttgtcctcctgtattttacttgaggctagtatcgcaggataatgacgaaaaatgttagaaatttacagatctgcaaatcgaggtaaaacattatgttcaaatatggttcaatttacaaacaattgcgcaaagatcaagaaatcactcaaactgaagcctgcaagggtatttgttcaatctctaagttatcacgctgggaaaataatcaggtagaagttgagtttagcaccgccattgcattactcaggcgcatcaacattacgcttgacgaattcacgcattacgctgcaatgaaaacagaatttacattgccagacgacattataacggccattaaagacaatgatacaaaggtactcgaaaaatttgttcaggagcagctaaatcattatcacgccaacaaaaatattctcgaactcaaaaacatcattcttgtctgcaatcaattatttctcatgactggtaaaaactatctaacacctgcagacattaatcgaatcggttcatacctgcttcacaacaccgtttggtctaaatacaatatcttgctttttgctaactcaccgtttttgctaaattctaaaatcggctatcaaattgctctgcgaattattcacaattttcaccctacagaaagtttaaacgaaaatactactattttcatgggcggtttatctgatacagttattgccttagttttcaaaaagaagctagattacgctcaaaaaattcttaatgaattaaaaaagataggacttcccttctatctcatgttctttagttcaacattgacccttttacaaaaaattatcgactactgccacactctcaacgcacagcctgtattggcaatgattgatgccatagttcagctaaattgcatggaagttgctaaaaaatggcttgagatttttaaagacgtacaacaaatctggccagaaaaagaaaattaaaaaccgtaaaagtaatttactttcacggcttttgacatggtattcattatgcaagcttacaaatttttagcttttaattaatccttaacaacgtctttggtgttcaaccattgactcttgttgatcttaacgatcttcttgccagcagctttcttaacatccttagcggtgtaagttgaacccattgaaaccttttggctagtcttgtgaccttgtgcgtccaaaacattaactttttggttcttagtgtcctttacagcaacaaagatcttgtcaccctttttaattgcaggatcagttggcatagtttcggcaacacctaactttggagcagtaaaactagctgcttgactaactgaagcaccaacacccattaaactcattgaagcaactgcgattgaaacaactttaactaaattctttgaaactaacataatgaatacctctaatttctatatcacttaatttgttggaactttttgttccctcattccttacgtctttattgtataacatatgttattaattacaaggggtttatcgaattttttaaaaataattcagtcgtctcaaagtattgctataataacgattgcggggattttttgtccaaaagcattaaaaaagtgtctgagaaaccgttctttcccaaacacttttttaagcagctgctacttcgtttgaattttgagtcacttttctagtttttaaactgacaaaaatcgctacaattagtgttattacctggattactaataatgtaaccaaagcaacagtaacattgaatgaaccagaaattgtggttaatactgttgtcataattggagcaacagccattaagattgtatttaataagccaacagttgaagccaagattttatgatcaactgatgttactagccattgctccattttaactgaagcaactcctgcaatagctgccaagaaaaacattgttatcataattacgtaagtatttcctaggaaaatgcttgttgtagtaacaatacttaaactggcagaaataattactaaactaaaaactgttaattttttgaataattgtggtccaaacattgaacccaatgcaaagcctgcgccaataaccacaccaaacaaagcaatagtaaagctataagtgccgattagcatagttgaacgatgagctgcaagtacaattgttgtcaatggagtaattgtatctaaagctccatttaataatgcgattactaataccacagtcaataatcctgattgtttcttcacttgggtcaatgaagttttcattgtttggaaaaagttttgatcattaacttcctttttttcaagtggcttctgatccttctgatgttttaagccaacactggcaaataacaaacctgctaacaagaaagtacctgcattaacaaaggctaaagttgagtatgacattactagcaaaagtgctgaaccaatgaattgagcacccatactaataatttgatttacgccgccattaaagcctactgcattcccgtattcttttttaccaacaatatcaacaattaatggtgcaaccaagccacctgaatatgaaccaatagtatctgataagaaattcacaacaacgatgattaaaaccaaattccactgtgacattttagtgataaacaataatcctactaaaccatataagataaatcggacaaatgctgctaaaaagatattgcgaaactttttcttagtcttatcagcaaggtaaccaccaaagatctcgaataattttggaactgattcagaaattgcaattaatgaaagtgctaatgagtagttttgtaatttgctagcataagtcatgaaagccaagtagaaaagaatatcgcctgcgcctgaaagaaaactagctactgaaaatcttctaaagtctgcgtttttaagaaatacgttcataaatcttacccctttttctttgtttcgtttgttgttgaaattataataaagtgaaaaagaaattaattttaaaaatggcgtattcgacattcggaggataaacctatgacaattggtgaattactcaaaaaaaaaagactagcagaaaacaaaactcaaaaagcatgggttggtcatattatcagtacttcttattatgctaaagttgaaaagaatattcatagaattacagcagaggatttattagccattcttaaacataatgatctttcaattactgactttttcgaagaattagcagacaaaaaggatgaactaaaagcacaagtaaactcgctaaataaaacagtaattgatgctgtttgtcattctgatgtttccaaagttaatgaagtcattcaaattattaaaaaaatggatctaccgactaagcaaaaacaagaacttatcttaatcaataaggggtttatcgaaactatcaaaaatgatctaagtgacaattatcagccagataaaaacatcgttcaacaactaaaagacaaaatttttagtattcctaattttaatagattcaaacttgaactctatactaatttcatgcaattttatgattatacaactaatattatgatcaccaaacaagtgatccataaaatagatcagtttaagagcgataaagagttattagcaatcgctggtattctattcaatctcctttcacaattagtcgaagaacatcattatcaagaaactgcaccatttatagcagctagtgagcatttaccctttttaccagacttatactttcctcaaaccggaatctcattgctaaaataccttattagttatcattttaataaaaaaacagcagacttagctaaagctgagatgattgcacaaacttatcaaattactggtctagaagactttggtaaaggtgcacaagaaattattaatgaagttaaagaggactagctttaagctaatcctcttgtttcaatctctaaataaaacctaacgcgttatagcacatgtgcaccaaaattgaatagcgcaaatctttggttgacatatagacccaagctaaaaccatgcctaagacccaatatactaagatatacttacttaatgccggatcatgcatatagccaaataaaaatccgcttgcaacaatacctagccacttatttctagtatttttcttagtgaaaaagatattgaaaaacatccctctaaagatatgttcctcacaaaatggcgcgatgaaaactactaggatcctaaataaacctgcattgtattccgctattttattcaagctttcctggttctttgaaacgccgccaccaactagattaagcatcacaatcgaacctactacaatcagtacaaaaccgatcatcgctattccgattctgcgccagtcccagtgtggtgtttcatcaaagccccaatcattttcttcttttaattgcctgcgataaatataggaaattgcaaacaaaactattaccgtagcaagcgccgtaacgaagacgcgatattgcgccaaatcaaatcgctgaggtctaaagtaaagtacttctaattcagaatacattaccaaagccaacacagcccctgcaatatttcccaggtaatgtccaaatctcttcatttttcattcacaccttgattctttcaactagtaatcattgtttctattataatgtaaataagaaaaaatacctaaggaggagtatctatctatgcttaatcagatcatcgcttttttggggagacgcggtgagttcttctacatttcagtctttatgttactgatattttttgcctttttaatctcttggcttatcgaaccaagacgtttgattaatggcgttttgtttactatctttatagtctcaatgctctcttggatcaccgttatggtgcacaaaagtacgagtcacggcttgcaacgtgcctatgacctactagttctagctgcattatttggcattgtcttattattaattttcgcctggatttttctattctggaatgcctatttcgtttggaaatatgaaagccatactttgcctaacttgcttactttaattaccggatttttagcattaattattagtattatcgtgctcttaggaccaggtaagtacttgccacgttggcttagtctcgcattagcttcaattcccgcgattgcaatttatttgggattggtgctttacaactttttggtaaacttgcttctatatcaaatttatcctcgtacctaccaccaagactatttaatcgttctagggtctgggctaatcaatggcgaccaagtatcaaaactgcttgcggctagaattaatcgggcaattcaatactctaaccgccagtatcaaaagggccgcaagcgccctatcctgatcatgtcaggtggtcaaggcgctgacgaaaaaatctctgaagcactcgctatgtctcgttttgcacaacggcgtggcgttagtgttgaccgtatcttattagaagatcaatcgaaaaacacatacgaaaacatgctcttttctaagcgtattgccacaaaagattttggtaattcccacttcagggcacgcttctttagcaataattaccatatttttagagctgctctcttggctaaggaagttggtttaaaagccaatggtgtcggtgcttacaccagattctactacttgcctaacgcaattatccgcgaatttgccggtgtgtttgtcatgcataaacgccgtcatttcgttatcatgggattaatcgttttattctttatcctgcaagctatcttagtcatgacaggattataaagatttactgtaatttagaaaagagggatgcaatgcttcaactaaagcatatttttaagtcatataaggtgggggacaacatcacccacgctttagacgacgttacaatctcgttccgtgaccaggaattcgtcgctatcttaggtcctagtggttctggaaaaactaccatgttaaacgtaattggcggacttgaccgttacgaccaaggtgacttgatcatcaacggcaaatctaccaagaattttaaagagaccgactgggatgcttaccgcaacaataccgttggttttgtttttcaaaattataatctaatcccccacttgtcgatcatcgccaatgtggaactagggatgaatttgtctggtgtgcctaaaaaacagcgccatgaaaaagcaattgcggcgttaacagaagtgggattgaaagaccatctaaataaacgtcctaaccagttgtctggcggtcagatgcaacgagtagcgattgcgcgagcaattgccaacgaccctgatattctactttgtgatgaaccaactggtgcacttgatactgagacttctgtccaaattatgaagttgatcaaaaaactatctaaagatcgactcgttattatggtgacccacaatcctgaattagctaaagaatacgccacaagaatcgttaatttccaagacggtaagattcgtcatgattctgatccttttagccctaataaggaagaagacaaatttaacctcaagcgtaccaagatgtcttactggaacgccatcaagttgagtttcaccaatattatgacaaaaaaaggtcgaactctgctaactgcttttgcttcaagcatcgggattatctcaattgccgtagttttagctatctctaatggttttcaaaagcaaatcaataccacaatgagcaaagctttagcaaaatatccgatttctatttcacagaccgcaactgacattacttcagctaatgcacgtaaagaatcggataaaaatgtcaaaaaccgcggctatgtaacggcagaacaagaccaaagcgaacaggcccaacacgttaataaaattagcacaaagtatgttaactacatcaagaagatcaatcctaattatgccaataacgtgtcttaccaacgcggcgtaagcttgaatttattagctaaaaacaagggaaaaattgaacgcgtgcaattttcaaatacggatcctgatcagactaattctgttctagctgctagatcccaagcgatgagttcaatgggactgggttcaagtgtctttcccactactttaaataaagagaaagactcatttttgaagcaaaactatcaattgctctcaggcacttggcctactaaggcaaccgacttggttttagttactgacaataaaaatactgttaacatcaatgccttaaaaaatcttggtttcgatttaaagaataaggaacacgtcaaattcggccaattagtaaataagcaatttcgtgtagttgctaacaatgattactatcagcaattgccaactggcatgtttattcctaaaaaggtaaataacgccatgtataacggtgctcaaaccaagctaaagattgctggtgtcattcgtcctaaaaacgaagattcaatggccttgttatcaactggaattgcttatagcgatcaactttcacaacgcgtgattaatgaaaataaaaactctgcaattgtaaaggcacaaaagaagagtaaccatagcgtattaactaaccaaaaactaaatgccaatgaaaagaaagctacaatgcagactcttggcggtaccagcatccctactggtatcatgatttatcccaacaattttgatgataaagataaagtacttgattatcttgacaaatggaacaaggggaagaaaaaatcagacaagattctctatactgacatgtcaaacgctgttaccacaatgactggcggcctcttaagcgggataacgaccatccttgtcgcatttgctggtatttcattaatcacatctatgattatgattggtattttaacttatacctcagtacttgagcgaactaaagaaatcggggtactcaaggcattaggtgcccgtaaaaaagacattactcgtgtctttgatgccgaaaccttcatcctaggtgttttctctggtgtattaggcattctgattgcttacctactaacattcccaattaacagtatcatttacaagattactgatctggcaaatgtagcccaactagatcctactgctgctattgttttgatcattatttcaactatcctcaccctcttaggtggtcatattccagcacgaatggctgcaaagaaagatgctgcaattgcattgcggagtgaatgaatttaataaagaatttgttacgttgttcacaataacctaaatttttagcaaaatatgtggtatcttagctttagcaaaaacaagtaagaaaggaacttttttcaccatgactgttaaaaaattagaaaataacagcgatgttaatgtagtggcagaagaaagcaaagttttaactgatttattgaatgaatcaactaagcaagtaatcggtcaagcagctttcgataagatccaaaacttaattaaaatctctgccgccaaagattatcaagaacttgaaaagcaaattgctagtcttaacaatcgcgaaacgattgttgttgcacgttattttgctactctcccactcttgatcaacatttcagaggatgtagaactagcaagtaaagttaatgtgcttaacaatactcatcaagattatctaggtaaattgagtgacacaattgacattgtagcccaaaagaaaaatgccgaagaaatccttgaacatgtaaatgtagtacccgttttaactgcccatcctactcaggtacaaagaaaaaccattttggaattaaccgatcaaattcatcaacttttgcgcaattatcgtgatgtgaagaatggcacaattgatcgcgatgaatggactgaacaaatgcgggcttgcattgaaattttgatgcaaactgacattattcgtggtcacaaattaaaggtagctaatgaaattaccaatgttttggcttactaccctaaggctttaatccctgcaatcaccaaatttactagtcgttacaaggaattagctaaaaaacacgggctaaacgctagtcatgctacgccaattaccatgggaatgtggatcggcggcgaccgtgacggtaacccttatgtaacggctgatacgctagaactaagcgctactttgcaaagccaagtaatctttgaatattacattaagcaaatcaataagctttatagagccattttcatgtctacttcttatatggagccatctgacgatgtaatgcacctatctgagctttctaatgatgattcaccattcagaactaacgagccatatagacgggcattctactatattcaaagccgtttagtgcacactgaacaaaaattactgaatattactaacaagaacactttcttaaagaaacgtgacctccaaaatcttgataaaatcccttgttatcaaaatgctcaagaatttaaagccgacttagaaatcatcaaaaattcacttgaagaagaccatgatcacgccgtagtagacagctactttactcaaattcttgaggctatcaacatcttcggcttccatctagctacaattgatatgcgtcaagattctagcgttaacgaggcctgtgtcgctgagctacttaagagtgctggaatttgtgacaattatagcgatttaagcgaagacaaaaagatcaagcttttactcaacgaattgaacaatgatccacgtaacttacacgccaataacaaacccaagtctgagttactacaaaaagaattaaagatctacaagactgctcgtcaattgaaagaccgtttgggtgaagacgtcatcaagcaacatattatttctcacactgagagtgtttcagacatgctagaacaagcaatcatgttaaaggaatacgatttacttgataatcaaaaagcccgaattcaagtggtaccactatttgaaacggttgaagacttgaataatgcccgggaaataattaaggaattcttaagctttgatatcgtcaagaagtggcttgtttctcaaaataattatcaagaagttatgttaggctactcagattccaataaggacggtggctacttagcttcatgctggaacctttataaagctcaaaaggatctaactaagattggtgaagaaatgggtatcaagattacctttatgcatggccgtggcggtaccgttggtcgtggtggtggtccatcatacgaagcaattacagcacagccattcaagtcaattaacgatcggatgcggatgaccgagcaaggtgaaattatccaaaacaagtatggtaataaagacaccgcctactacaacctagaaatgttagcttcagcaacaatcgatcgaatggcttctaagcaaattgttagcgaagatcatgtcgcagatttccgttcttcaatggatcaaatcgtagctaaaagcaacgaagtttaccggaaactagtatttgagaatcctaacttccttaagtacttcttccaagcaactccaatcaaagaaatctctggtcttaacgtaggttcacgtccagcttcaagaaagaaactcactgacttttctggcttaagagccatcccttgggttttctcttggtcacaaagccgtgtaatgttccctggttggtatggcgtaggttctggtttcaagtcatttatcgatgctgatccagccaacttgaaggaattacaaaatatgtaccaaggttggccattcttccactccctgctttccaatgttgatatggttttatctaaatcaaatatgagaattgccaagcagtatgcggatctttgcgaagatgaacaagttaaatcagtctttgatatcatcaatcaagaatgggaactaactaagaaagtcatcctacaaattgaaggtcatgatgaattaatcgaagatgcacctactcttaagaagagtctggaatacagaatgccttacttcaacattttgaactacatccaattagaaatgatcaagcgtgatcgtgaagatgagattcaaggtgtttaccaaagtattattccaattactatcaacggtgtggcttccggtttacgtaattcaggataaaaaacacataaaattcagctaaaaaaggctcctcattgcctgttttatcaagcatttgaggagcttttttttaatttattaaactttttagttacgcctttttcataactaagttaagtggcgttacaattactggaacgacaatggctgtaaaaattgcttctactaaaccgttcatgcccagtgccataattaaaattaaaatcaatggcgtacctgaactataatttcctaggtaatgagttaagcttgctggatcatgcatgaagaaaatactcgtcagcaaaataaccatcacggtattagttaacgaagtgactgctccacttatgatataacccaatttcgcatatttagtcttactcatacccttcgcaataattcccgggaaatagccagccaaaatacttggtaccaatgaaattaccggattttggaacaacattaagctgaccatatcgccaggttgagtatatgcaacaatcaatctggtaataccccagaataagccaaagcctagacccgccttttgtcccattaacgtgccatagacggcaattgtcattggaatagtagttacagctggcaaagccgggataattcttacatagccaacatttggcacaaaagtctgtacaatcaataaagcagcaaagacagcagtaattgctaatcttttagtttcttctcttctcatatatttctccaacttaattctttagactcaattaaaccataattaagattttttctcagcaaaaaagtttattatacaatatctaggtatattttatctaatatgacaagatattgtattttttattatttttttacttaattatgcattatccttactctctctaatgcataatcgtgttctataccaattaagaatccctttatatcaatactttatgttgtatgtcaattttgacatagccactaaatattgttaatctcgttttgtgttaaaaatcatttgatggagagaggatcaattttatgaataaaaaagtcaaaaaattactatctattggtgtgcttgcattgagtttaggtgcaattttaaccgcctgctctggtaaaaaacagggtgcaagcaataataaatcaagcgatgccaagcactctattgcattaattgctgacggtaatggtgtaaatgataactcttttaaccaatctgcttgggaaggatttcaaagttatggcaaagagcacaacttgagccgcggtcgaaacggttatcaatattttcaatcaagtagtgctgctgatttcactcctaattttgatcaggcagctaaagctggttatcaaactatctttggcgttggttacagtttaaaagatgccgtagcttctgccgccaaacgctatcctaaaaagaattttgccattattgacgatgtaatcaaaggacaaaagaatgttgtctcagctaatttcaagagcgaacaagcttcctacttggctggtgtcgtagctgctaaagaaaccaaaaccaacacggttggcttcatcggcggtgctcatggcgatattgtcgacctttttgatgccggatttactcaaggtgttaaagatcaagccaaaaaaatgcacaaaaaagttactatcttaaaccaatatattggcaactttactagttcagacaaggccaaatcaattgctcaatcaatgtacaccaaaaaagccgacatcatcttccatgctgctggtggtgctggtgatggtcttttccaagaagctaaagccattaatcaaactagaccagctaaagataaagtgtgggtaatcggagttgatgtcgatcaatctcatctcggtaactacactgctaaaggcggacaaaaatctaattttgttttgacatcagtaataactggagtaaatgttgctgttaaagatatcgccaatagagcttataataataaattccctggtggtaaaaatttagtttatgggcttaaaaacaatggtgtttctattgaacgaggacagatttcagcttcaacttggaaagatgcccaaattgctagagctaatatcctaaaaggcaaaattaaggttgccattcatcctaacaataaataaaagcatactagtatagtttgctttttataattacaatcaattattttttgcctgatcaatatttttgttgacaaaataccgaacaattaataaacttatttataaattgttcggtattaatattgtggaggacagaaataatgaacgtaaagttcaagaaaattttatcatttggtgtcgttttagcatcagttggcttgattctaactgcttgttcgggtaaaaagtctggtcaatcagccaacaaagatactaaacatggcattgccctaatcacagatgaaaatggtgttgatgatcattcatttaaccaagctgcatggtcaggatttaaagcatacggcaaggaacatggtttaaaacaaggaaaaggtggttatcaatacttccagtctagcagtgccgcagacttcactcctaactttgatcaagccgctacagccggctaccaaaccattttcggtgttggctatcaattagccgacgcagtcaagcaagcagccaagaagaatcctaaaaagaatttcgttatcattgatagcgttgactctgggattaagaacgtcgcttctgcaacctttgaaagcaatcaagcttcttatcttggcggattggccgcagcttacaccactaaaaccaacaaagtaggtttcattggcggtgctaagtcatctattattgatttattcgaagccggttttaagcaaggtgttgctgacggtgctaaagctcttcacaagaagatttcagttcaaacccaatacatcggtaacttcacttcaaccgataaggctaaatcaatcgctcaatcaatgtatgctaaccgcgctgatattatttaccaagcagccggtaacgcaggtaacggtgttttccaagaaggaaaagattacaaccaagcccgtccagcagctaaaaaggtttgggtaatcggagttgacgttgaccaatctaacctaggtaactacaagtcaaaagatggtaagaaagagaacttcactttaacttccgtcttaaagggcttagatgttgctactaagtcaattgctaatgatgcttacaatggtaaattccctggtggtaagcacttagtttacagcttaaagggtaatggggtttaaatcaccaaaggtaatttaaacgctaaaacttgggcagcagtacaaaaggctcgtcaacaaattattgatggcaagatcaaggttgctactgctccaactaagtaattcagctgcttagtattttgagaactcttcgttttttagcgaagagtttttctatagttaattaaggaagtatttatttacatgaaagaacagagaaataaagtaatcgagatgcgtcatattgtcaaagatttcgatggtttcaaggcaaatgacgatattaaccttacgctctatcaaggtgaaattttcgctttgcttggtgaaaatggcgcgggtaaatctaccttaatgagaattttatccggcttgcttgaaccaacaagcggtgaaattctggttaataatcaaaaagtaaatattaaagatccaaccgtcgctaaaaagttaggcattgggatggtacaccagcacttcatgcttatggattcatttaccgttttagaaaatattattctaggacatgaatcaactaagggacccgttatcgatctgaaaaaggcaagaaaacaggtcctagctcttgcacaaaaatatggctttgctattaatccagatgccaaaatctctagcattactgtcgcccaacagcaaagagttgaaattctaaaggtactttatcgtggtgcagatattttaatttttgatgaaccaactgctgttttaaccccacaagaaatttctgaatttattaaagtactcaaaaatttagctaaagaaggcaaatcaatcattttgatcactcataaattagaagaaatcaaggctgttgcagatcgagttacagttatcagacgtggtcacgatgttggtacttttgctgttgatcaagttagtgatgaacgattagccgaattaatggtggggcggcatgtcaacatgaaactaaccaaaccagcacctaacttgggtaagcaaattttggcaattaaaaacttacaggtaaaaggaaatcacggtgccttaagcgttaaagacctttccctttcaattcgtggaggcgaaattttagggctagccggaattgacggcaatggacaagatgaactggttgaagcaatcactggtttacgccatgttaagtcagggcaaattttaattaatggtcaaaatttaaccaaccaaaaagttcgcaaaatcaccgaagctggcgtagcgcatattcctgcagaccggcaaaaatatggcttaattcttcacatgtcattagctgataacttagcgctgcaaacttactaccaacgtcccttctctaatcatggcatcattaatcatcaagcaattttgaagcatgccgtagatttaattaaaaaattcgatattcgaactactagccctgcattgccagctagcgacttatcgggaggcaaccagcaaaaagcaattatcgctagagaattaaatagaaacagcgatctaatcattgcattccagcccactcgcggtttagatgttggtgcaattgagtatattcataagcagcttttagctcaaagagcagcaggaaaagctatcctattaatttcatatgaacttgatgaaattatgcaattatctgaccggattgctgttttgcatgatggtcaaatttcaggcgaagtattacctgaaaaaactacagatcaagaactaggtcttttaatgaccggtgttaagaaagaagatgcaacaattgattaaagttacacctaaagtcaaaaatattctagtaccagttatctcagtaattgctggttttatagttggtgcaattatcatgctgatttggagttataatccttttcaagcatacagctccatgttctctagcgcactgggcaatatgaatggtattggtgaaactattcgtgaagctacgccattaatttttattgctatcggttttgcaattgcctcaaaagctggcttttttaacatcggtttgccaggtcaagcacaagctggttggttgacttctatttggattgtattggccaatcctcaattgcctaagccagtattattgcctttagctattattgcaggcgctatagctggtgctattgtggcaggaattgctggctatttaagagctcaatttggaactaatgaagtaattactactatcatgcttaactatattgtgctctatacttgtcaatatttaatgcaacaagtaatgtcctcaaaattaagaattgataccgatactaccaaaacaattccagccaatggcagcttaaagcttaactggttaactagcatgtttggtgattcgcgaatcaatgctggtattttcttagcaataattggacttattttttattggtatttaatgaaaaaaactaccgttggttttgaaatcaaggcagttggactcaatccttttgctagtcgctatgccgggatgtcttctaaaaagaatattattatttcaatgttactttcaggtgcattttctggcttaggcggtgtagtacaaggacttggtacctaccaaaactacttcactcaaacaactagtttggatattggctgggacgggctttcagttgccttacttggtggtggaactgcaattggtattttattagcttcacttcttttctcaattttaaaaattggtggtttgggcatgcaaactattgccggtattccttatgaaatcgtatctatcgtaattgctgccatcattttcttcatcgctatcaattatgtcattggtttgctttttaaaactaagaagaaccgcagtgattactacattccaaccagaaaagaaaaaggacccaacaatggtgttgatggtccaggtagaaaagtaatcgaaggagaaaaataatgaatttcgttacaatgatggcgttaattgtttcatccactttagtttattctgcgcctctaatcctagcttctcttggtggtgtttacagtgaaaactctgggattgttaatattggcctggagggtatcatgaccatgggagcctttgcggcgattgtcttcaacctaactttcgcttcaacttttggtgcagctactccttggcttggcactctagtcggcggaattgttggtttgattttttcattgcttcacgctgttgccacaatcaattttcacgctgatcatgtcatttccggaacagtgctgaacatcatggcaccacctttgggtgttttcttgatcaaggcaatttatgataaaggccaaactgaaaatatcaccgctaacttcggctacttcagctttcctggtttaagcagcattcccatcgttgggccaatcttcttcaaaaacacctctgcccctgcttggattgccattattcttgctattttgatgtggtggattttatataagactcgctttggcctacgcttacgttcatgtggtgaaaatcctcaagcagctgacacaatgggaatcaatgtctatggcatgcgttatgcaggtgtattaatttccggctttatggcaggtcttggcggtgccgtctttgctcaagcaatatctggtaacttctctgtttctactatcgttggacaaggattcatggctttagctgccgttatatttggtaaatggaatccaatcggtgcaatgctctcatcccttttctttggttttgctcaaagcttaagtattattggacatcaactgccaggaatcgatcaaattccatccgtttacatgcagattgcaccttacgttattacaatcatcgttttggtcctcttcctcggcaagtcagttgcacctgccgcagatggggttaactacatcaaatcgaaataagaaaaaaaggttgtttcacatgaaacagccttttttttacacatgtccacatagttatccacaagatatagtgattatatgtggcaatcttactatatcttgtactaaataacagccaacggcgttttatcagttggcattggaaaatcactgttaagcaatctaagctcatcatctgtaagtttaatcttttgtgttgcaatattttccttcatgtgttctacactacttgccttaggaatcgttaaaacattgccattgcgcatcgtccaagctagcattatctgatgaggcgtaacgccatgatcacgtgcaacaattttcaaattacgcgtaattcgaattgtgttgcccttgcctgaattaaatggtgaatacccaataaagtttacaccgtgctcttcttgccaagcttgcagatcaaattctgtcccacgttcactgatattgtataagtcttcattagcaaagcattcttctccacctggcactgtaaaaagctcctacatatcagccgtatcaaagttagatacaccccaataacggatcaagccatctttttgtaatgcttgtaagccgcggatcgtatcagacaagcgatgactgccccgccagtgtaatagataaagatccagatgatctgttccaagacgttttagactggcttctagactctgacgttctagttttggcgttgcatgataggggtagaattttgaaatcaaaaataatttttcgcgatcatatcctttaatcgcttcaccaattagctcttcgctttggtcatccccatacatttcggctgtatcaaatacactcaagccatgatcaaagccatagcgaatagctgctatttcatcttttttctttttaggatcttcacccaaaccccagctaccaattcctaaacctgttagtttttcaaaattcatcctcgttcacttccttatgttcaaattttaacataattgattcgtaattatttttatcaatcaattgacaaaatggtctattccattttataatggactagaccagcaaatgaggaggacttaattatgaaagttattgttaccgaaaataaaattcaaggtggagcaaaagcatttgaaatttttgaaaaaggaatcaagaacggtgctaaagtcttaggtttggcaaccggctcaacccctgaaacactttaccaaaactgggtaaaaagcgatcttaactgtgaaaatcttaccagcattaacctcgatgaatacgttggtttaaccccagataatcctcaaagctaccactacttcatgcaaaagcatttatttgacaagaagccatttaagaagacttacgttcctgacggtatggcaaaagacgttgatgctttttgtaaagaatatgatcaaattatcaaagacaatcctatcgacattcaactattaggaatcggccgcaatggtcacattgcctttaacgaaccaggcactccattcaacatcggcactcatgaagttaagttaaccgaaaatactatcaaggctaatgctcgcttctttgacagtatcgatgaagtgccaaagagtgccatctgcatgggtactgctaatattatgcaatctaagaagattgttttgatggcttttggtgaaaagaaagctcacgcaatcaagaaaatgattgaaggcaaagtcactgaagaagtacctgcatcaattttgcaaaaacacccagatgtaacggtgatcgtagacgaggctgccgcacaagaattagacgacaaatacaagaactaaaaacaataatttaattatcagcatagaaaaagctaggctttctacaatcgtggaagacctagtttttttatttagcagcctgtatctacaatgaaatatacttcacaaaattgcatttttatataaaaaatgaagcataattcagttttttattgaattatgtttcattcctattcgattttttatttctacccttgacttttagatgtgaaacataatcaaaaaatcacttgtgtgccacaacatatcgtattaaacttaataattgtctacatatggtatttaagaaagaatgtgattcaagttattgttttaagtgggccaattggagccggtaaatccagtttaaccagtattctagctgaacatttagggactcaggcattctatgagggcgttgataacaatcccgtattgcctttatactacaaggacatgaagcgttacacttttttgcttaacacttacctccttaaccaccgtttagcacagatcaatcaagcaattcaagaaaaaaacagtgtctccgatcgttctatctatgaagatgcactgttcttcaagatgaacgccgatagcaaggtcgctgatccaaccgagttcaagatctacgatgacttactcgacaacatgatggaagacactcctggcaatccaagtaagaagcctgacttactgatttacattcatgtctcccttgatactatgcttaaccgaatcaagaagcgcggtcgttcatttgagcaaatcagcactgatccaggtttgaaagattattacgcaagacttttaaagtactacgaaccatggtatgaaaattatcatgcctcaccaaagatagaaatcaatggcgacaaacttgattttgttaccaacatggatgcacaaaaagaagtacttaaagaaattgatgaaaagttgcatgaaatcggcaacttataagaaaaagaaggaacgtgatgacagttattgttttaagcgggccaattggagccggtaaatccagtttaacaggtattttatctaaatatttagggactaagcctttctatgaaagtgttgatgacaatccagttttgccacttttttacgctgaccctaaaaaatatgcattcttattgcaagtatatttcttgaacacacgcttccacagcattaaagacgcgctcactgaagataataacgtcttagatcgttctatctatgaagacgccttattcttccaaatgaacgctgatatcggccgtgctacttctgaagaagtcgatacttactatgagttattgcacaatatgatgggcgagttagaacggatgccaaagaagaatcctgatttgctggttcatattaatgtttcatatgatacgatgatcaaacgaattcaaaaacgtggtcgtccctatgaacagttaagttatgattcaactttagaggactattacaagcgtctgcttcgttattacaagccttggtatgagaactacgattactcacctaaaatggaaattgacggtgataaattagacttcatggctaatccagatgataaagaaaaagttttggatcaaattacagccaaactaaaagagatgggcaaattacctgaagattgggaaaagcctaccgatattcaaattgaagcataataaaaaccattcatttgcgaaattatcgtatttgaatgattttttgtttacagtgaatttttcgctttatttttgtataatttgaaaaaatgtgtttaaaggaggagtttgaaaatgatgttaaccgtaactggtggacaatggtttttcccacttgtcataatttgtctaattttgggtattgtcgcaaccatcgctcaaaagaaaaagctgactaaactaaaaagaataaccgataactttgcctatgcaatattagttattctcttaatcattgaatggattctatattttcaaaaacaatttaattttattactccagcaatctacacccttgttgtcatctatcttattggacggcaattactaatcagataccgttcttctctattgaaaaaattaggggctaaatataagcaactgacaattggacttgctactatttacattattttagttaccttattgcttttaatcggatctaaattttcaactatgggctggatcattgctggattagttatcgtagcctttggcttcgttagctacatctttgaaaaagacaaacaataatttcccaggaaataataaatcgcatagagcttctatgcgatttttatttattcaatttttgctaatgccttcgcaaccccatcatgattgttatcagcagtaatttgttccggagcaaatttttgttttagttctgctggggcattacccattaaaaatggataccccacttcttccaacatatcttcatcgttatagttatcgccaaaagcaatgcaattttgcaagtctacgccatattcttgagcaactattttgactgcactagccttgcttacaccctttaaaacaatttctaataaattctctgctgatctaacaaaagtcaaatcaggatatttagcagttaattcttcttgcatacgatcaagatccgctgaatctcccataattagacctttatgcacgccctgcagtttttcaagttgattaattgtagtcggtgttgcttttacatcgacaattctttcttcatttttaacccgtgggctcttttcttcactacaacaccaaacatagccactatagatattccaagctgcatcattatcttgctcatcaaggtagcggcaaatttcagctgcttcttttgcattaaaaaaacggctgattagtactttgcctgtttcatcaagggctaaagcaccgttatacgcgataaacggacaaactttcaaaatttgattaaccactgtcatcatccctttaggaagacgtgctgatgcaggaacgaaaatattaccattaataatttgtctacgaattgcatcccgcgttgcggcggttacctttaaatcatcattaattaatgtgccatcaagatctgaaaaaataagttgtgcggacattctttcacctttatttcttttttaattcttatatcctaggataatgctttatttatgctaatgaaagctgattcaattaaatgcttttcctatcatttaaagataaattgcaataaatgcccaagtaatcattaaaataattcgcgtttacaaatttatttatcaatgctaaagtataagagttgtgttcaataagttaaaacacgaacaatattttggggagataaaatgaattttataaaaagctactttcaattagataagtacaaaaccaacattcgaactgaatttattgctggtttaactacctttatcagcatgtcctatattttgtttgttaaccctagcgtactgggcgccagcggtatgaataccggtgcagtcttcaccgctactgctttagctgccgctcttggtactgcaatcatggggatcgttgccaactacccgatcggtgaggcaccagctttgggaatcaatgccttctttgcttacaccgtatgtattgggatgcatgtttcatgggaaacagccttggcttcagttttcgttgcatcaattattttcatcttaattactttattcaaattaagagaaaagatcattgattcaattccagctgacttaaagtttgccatttcttctgggatcggcttattcattgcctttttaggtttacaaaatggtaaattgatcgttgctaataaatcaactttggtaggtttaggatcattacacgatcccctcgtttggatcactatctttggtttgctagtaactgtcattttgatgatcttgaacgttcctggtgcaatctttatcggaatggttcttgccgctatcttcgggatctgcactgggcaaattgcattgccacacaaggtgatttctaccgcacctagcttagctccaacctttggtcaagctattttccacgtaaaggacatcaactctgtgcaaatgtgggttgttgtcttaacattcctgcttgttactttcttcgatactgcaggtaccttaatcggacttgctcaacaagctggtttcatgaagaacaacaagatgccacgtgtaggtaaggccttagcagctgactcaagtgcgatggctgttggttcaatccttggtacttcacctgttggtgccttcgttgaatcaagtgctggtatcgccgttggtggccgtaccggtttaaccgcagtttttgtagcgatctttttcttaatctcaatgattttcagtccattgcttggtgttttcactagccaagttactgctcctgccttaatcattgttggagtattaatggcacaaaatactgctcatattcattggaacaagttggaaattgcagttcctgcattcttgattattttagggatgcctcttacttactcaatttcagacggtttatcatggggcatgatcacctaccctatctgtatgcttgctgctaagcgtggcaaggaagtcacaccgatgatgtgggtactgtttgtagtattcctgatcttcctgtgggtactgaacttttagatgaaaaagaatagataaagaaaaggactaagttcgaatttgaacttggtcctttttgtgtattcactaacattactttttattcttatcgattataatcgataaaaacgtcaaaatcaccaatcttatcgagtataatcgataagatcgcaaaaaaagagtcttttatcgactatactcgataaaggctcttttttatattacccaggaaatattaacgtacagtttctaaacaatatgattttttataataaaatgcgtcataacaggcgaattttaattggctttaaaatttcttttttctaaaaacaagatagcctaaaagggtaaaaagaactatatagcacaatgtaccaattaataattgtggattagagagatgggaggttaagtgataagttgcataattataatactgtgtcgttaaattgagcatattcaaaggattccaacgaataatatcaagcggtccaatattataatttaataaattagatgatagactgcttcccataaagataataattgcatttatcataataactacggtgtttgaattaatcatacaagacattaagcaaataaggctgattattaacgtagaggttataatatcaacgcctgttgttgaaagcatatttataaataatgactgattatacttataagtcgcagtccaaggaactatttttgctataagtggaacagtgttaaagaagatagttacaatcatagctatggcatgtagaaaaagattataaataaaaattgtaatgaactttgcaagatatactgttcctttattttgagcatgatatagtaatgtcaaaatcgttttgttttggaactccattgagaaaatagttgaacctactatgaccaaaatcaacataattatttggctagagttataacaagtcataactaacaaattgccatattgttttcccatggccaatcccataaaaatcataaaaagaatcataaaactgataatccaccaaggcagcttacggtgacctaacttatagaattcttgttttaattccgcacgcataaaagatcacctccgcctaaatagaccgctttttaaacagtaaagcgccaatcccaaagaaaactacagcgtacactaaattagcaataattaattctgaattagtcaaatgtgttacagtaaccatctcattattcgatagttgcgtaatgatattaatcatatttaatggattccaggctaaaattgatttcaaaccaggaaaagccgacattgctaaatttgaaagatccgaaccaagaaatccgattgctagtccgattatgatcactgttgcattattcctaatcaacaaaataagcattaaagagagggcaacgataaatattaaataaatcatcgttcctcccatatttaggaatagcgcattgattaagggatgtccatgataatcatcatgccaagaaaatttcgaaccaaccatcaaggtcttgagaataaacgaaaagattatcccaaataccagtaagatgaaactataaaaaactaaaacaatgaacttagctgtataaagaatggacttatgtgatgttttgtagagtaaggttgccatagtattatttcgccactccattgcgatcatatcagaactaatagcaataatgatgataatagcccattgtcctgcaccgaatccttgagataagagtgagggcgtcattttataacttgtaccaactgtatacaacattagtactaataaaacgagaatcccatacaatggaatcttgcgatgagcaaatttatagaattcgtgtgagagattaattttcattattatctcccccttgttcttgccgtaagatgttgacaatcttctgttctaaagttaagccagttggagccaaatattctatccagatttcattatcaaacagtagcttttgaattttatctatatctttatgatcaactattacagcatcatcttgtctatcaaaaggaattttagcttgttgtagcaaattggtagtttgctttatatcagttgtttttaatttagattttggatttttttcttgagtgaatttgctcataggtgaatttataataattctaccgtgattaataatgattaccgatgtcattactttttgtaattcacttaagacgtgactggaaattaagaaggctgtaccacgtgcagcgtattcatgtatcagttttcgaattaagattgtagcttcaatatccaaaccattcataggttcgtcgagaataaccagttgcggattatttaacaaagccaaagctattcctagtttttgcttcattccaactgagtagtcttttgcctttcgatcaatataatctttcatccctaatcgattaatcagtttatccataccacttaagtctttagcatagagctttaaattatcatatccagacagaaaaggataaatagcaggattttcaattaaagcaccaacagattgtagtgctaaatgatctttaagagtaatttcgtgatcattaaaactaattgaaccagtgaatttagttaatcctagcaaagttttcataatggtggttttgcctgctccgttatgaccaataagtcctacaatttcaccaggtgaaattgtaaaagatgcatctctaataatctctttgtgaccataaaaaatatttatattgttaacttttagcatgctatcctatctcctttaactccggattagacagagagttaaatcacttttctaattaaagtacctatattaaagtctagtatcctttcctgaattgtcaaattaagtgcaacagttgtaagtgtcaatgtttttgcggtagtctttaaaccattagtctaaccttaatttcttaaatatttatatgacttaaatttctgcttagcttgcttaaataactattgccagctacctgtgcggttaatgcgccatgctggatgcctaaatgaacttcatgacgcttctttaagctgtcacgggccgctgcttttaattcctgttcagtcaatacagttatttctgaatcttcaaactcgctgctaagccaaaattccagctctcgattcttgatgcagcttaagatcctaagcatgccttctgctccagattttgaccatttcttgctttgccccttaacacggtaggtatacttgcggtggttgctctcgcagcagccaatggctttagtcacagtcagttttcgtttcttaaacggcttaatatcgtcccaatgacgatcaatataattccttaggcgccccagataatcatgattgagctcggtattcaattcatcaattagtcggctttctgcagtggttaggatagttttaactttgtcatagctgtatttgtattccaaagcagaaatcagcttgccttgcaggtcaggcgcaaaatatagcctttctttgattttcttatttaggtgaaagacatccaagaaatgctcatgacgcttgcatagccctacaatgtcatcgaagtctgttttggcatatccagcaccgccatcggcgttgctaagaattacagtatcagaaagatcataagtattggccaggtactccttggcttcgttcagcgcatcaagtcggcttaaagaaacaaattccttggcattgattcgctttctgcgtttcttgcttatattgacaatgccttcacagacctgatagcgatgaaattccaaccggcttttagtgcctttgatcaccacgccatcgccttcaagatacaaaactgggacctttttcttagtgcctgcggcatcatatcttgaatctgcttcttggcccgctttaatatttttcccggccatttttaccaaattgcccacctgcatatggctaatattaaagccagacaggcaattgactgctagagcagtattgcgataagtggcaacgctgcttacttctaagatgtttttgactgctaaaatactgtagcgcttgtatttgtcaaagcccattaattcatccaagggatatcttgcttgtttgcctgggcagacatatcttcttctgacatacctaacttcgccaaaagccatattgattgagcgctcattcttcttatcaatctgatagccctgtgctttaaccttggtaatcatttcatcatcaactttagctaaagccaaggccatgatttccttaatcaggtttaagaagaaacagattatttttctttcacgcttaatataattatcttcagactttataatatttgcgatttcagttacaattgaattcataaaagacagcttctaatgtgttttttgttcttaacatcagactactggtctttttgtttgagctcaagtccaaattcaaaggacttgggcttttttaattatttattcaacttaccgtaaaaaattatacacttaggcaacagttaggctatgaagaaatatattgcttgaagagttcttctgctgtctgatattggaggattcggcgatatttgtggttaatggcattggttgcctgttgaacataagcttttgacttgtctttcgtgctcttgcccttagggaagaattgacgcagaagtccattgcagttctcatttgtgcctctttcccaaggagaatatggatgagcaaagtagatctgacatcctttgattttggtcatatccgcaaactcagaaccattgtcaaacgtaattgatttaaaccaattaggatgtctgtcaatctccttttgaagcagtctttgacaagtactggcccgatagtcaggaattttgataacaacctcaaaacgagtggttctttcagtcagtgtcattaaggcaggttgatttttacgtctgacgcctttaaccaaatcgccttcccagtgcaggggaacttttctgttttcaacttctttaggccgctgttcaatcgaattgccaagattctttttatgcggagcatggccaccatgactatgatggcgtttgtttctgcgtcttttaagcttcattggcaggtcgatattgcttatatccagcaatccttgatcaatataacgatagacagtgggcgtgctaggacatggataatttggcataatcctgtgaaattcaccaacgaattcatcaatgctagtggcatcaaatttggctttaaagcgtctgcttagcattctgaaaaagacggcatagtgttgcagtggattacacttatagcagtttctgcggcgcttttcatgataaatttgtgcagtatcagcgtaatagtgctcatacaagacatagctgctgtctctttgcaggacactgcctcgtctaatttcacggctgatagttgatttatgacagcctacttcttgagcgatagcagtgcaggaggttatgccagaatcaagcagagcttgaatttgtccacgttgttcgctgttcaattgatgataatgcttggaaatgctagaatttgagttggtcatgaagatcttcctttcttgatttttggtcacatcaagtttaggtcttcatggcctttttgtttaacacttagtgttgcacttcaattttaaatccgggtctagtatccttttaataaatattttttactatgttcacatatgaacaataaatttaagattatctctaataaaaccgattttaggatttttttgaataaatttgctttatttgtttaaatgcagtttcaaaaccatcttttagagtattcaagccctgcagttctaaagcggcccacatcaaccgtaaattgcgatcatcatttgtttccaaaaaatttaacataaaatgcatgtatttgtatcttattttttcaaaagcaaacctgtctgtaatatctaagccagaaattattgcatctaatctttttgccttctttagatcttttttaataagaatatattctgcattaatcaaagtatttgagactgtaaaatagtttgtgtaaggatgaatgattccttaaatttatttctttaaacattagaaaaaggagttcctttctcgtatgattggtttgaacaaaaaaacacatacagaaagaagaactccttcatgaatgattttaccaaagattttgctcaagctctattcaatccagacaaaataaatgatttattgcgcaaagagctacaacaggctgttaataacttgttagaagctgaattgaccgcctttctgggctatgatccctatgccagaaatggctggaatactggcaactctagaaatggtgcttatttccgcaaagttgatacgcaatttggcccaattgaagtgcaagtgcctcgggatcgcaacggtcaatttcatcagcacacgctgcctgactacaagcagcactcggatatcttggaaagcatgattatcaagctttactccaagggcgtgaccaccagggaaatagccgatctaattgaaaagatgtatggcagccattacagtccagctcaggtatcaaatatttccaagcagatgattccaaaggttgaggcttaccacaaacgcaagctaagcgacaagtttttctgcgtctatttggatgcgacataccttcctttgcgccgagaaacatttgagcgtgaagcagtctatattgccattggcatcaagcctaatgggcacaaggaggtcattgactactgcattgcacctagcgagaacattgaagtctggacagatatgcttcaaaacatgaaatcccgaggcttaaagcaagttgagctttttctttctgatggtgttgttggcatgaaaacagccttggccaggacttatcctaaagctcattttcaacgctgtttggttcatgtcatgcgcaatatctgcgctaaagtacgcgtcgacgatcgtgaaaagatcatgaacgaattcaaacaggtgcatcaacagacaaacaaagaagaagccacagctgtcctgcatgacttctataccaaatggggcaaggtttacagccatgttatcagaagcttgaaagacatagaaccagatctgctggtcttttataactatcccaagcagatcagagcttcaatttattcgactaacatgattgaatcatttaacaatgtgatcaagcgcaaagctaagcctaaggcagagtttccaactgaacagtcgcttgatgcttttattggcattcaggcaatgagctacaatgaccgttatttcaatcgaattcataaaggctttggtcaggttcaggacaccttagaatcctactttgattaaataaataattaaaaaatcaatttacgagaaagatctatttacacaaaagatttgacagtttcaagtatttaaaatagctgtagaaaatttcatttccaaatcgttattatttttaaaatagaaaactagtgaaaaagataaactataaatagttcttgggctaataagattctgagtattaccaaagaagtacacatcatcgtaataccaaacttcatctccagataaaatttttgaaaagtacatcgataatctctttttatagttatctgtaaaaatatccactcctgtaagatcgtaataagcattacaataaatggctgcttttaaaaaagttcgtttatcgaaactgtcattttcaacttctgataacaattttttagattgcgtttttaagtaattaatatcattactttcatatgcttttgaaacttctaaagttatattttttagataattcgaaatattattattaaagaaatctattttttggacatgaattacttcgagtagtttgaatactttttcaatatctaaacctgcttcgcctctttcccatctttctaattttgaacgagaaatacctactgcttccgcagctttactacttgaaattttggttgcctttcttaattttctaccatatgtttctttcataacccactcctagttacgttcacaaataccttcaaaataatgatccagataaaggactagttttacctccttaatgatgccttaatgcaataaaaaatcaaactcataaatattacctaaattttcatttagagctactaaaaaagcctaataccatcatcaagggtattaggtctttattacctaggaaatactaacgtacagtttccaaacaatatgattttttatgacagtttgggcaacgcaattttctagtatgtggcgtgtgtgccgcaaacataaagcttttaagttctggaacaaatttgtaatcgcaattaggacaaatatatgccactttttgataataatttttaagtaacacgaatgacattgcaatcaagcttactactaaaatagctaccgaaatataggctgcagtgttcatcttattgatgatacagtacgcaataaatgccataccgaccaattcaacagtgatttctactgctgacaatttccacattgaacgtgttacctctttgtatctagtttcattattcatgattttcgtaatgtcagtaacttccgcaatattattgggtttacttagaaccttttgtagttggataattttcttgttttgctcttctaatttttgcgtttctgctttatttctttttagttgatcttcaagcaaaagatcgattaatttatcaccatttttatcttctagtattttttgaatatcctttaacgaaaagccaagctcctttaaaaagatgattaattttaattgttttacctgctcatcagaatataaacgatagccactttcactaactcgactgggtttgaccaaacctttttgatcatagtaacgaatggttctagtggttatgtttaacttctttgctagatctccgattgtgtattctgacattactttctcacctcacaacttaaatatacgggtttacgctacgtcagagtcaagaataagctaaattttccgtaaaaaacttcaaaaagcaaatattttgctcttttcctattgaaattattaacattaactgtataattttaagtgaatgttcactttatacaaatttcggaggactaaatgaacgcaatcagtaatttctttcatttaaaggagaacaatacctcctttaagaccgagcttttagccggtttgactacttttgtaagtatgtcatacattctgttcgttaacccaaacgtcctaggtgccagcggtatggataaaggtgctctattcaccgttactgcattgtcggctgcctttacctgtatcgtaatggggcttatcgctaactacccaattgcttccgcaccaactttgggcttaaacgccttctttacctatactgtttgtttaggcatgaaggttaagtggcaaactgctttagcagctgttttcgttgcatcaattctgttcattttgttaactgtctttaaggtacgtgaaatgatcattgatgccatccctgccgatattaaatatgctatttccgcaggtatcggcttattcatcgcctttatcggtttgcaaggtggtaagttgattcaaaacagtgattctaccttagttactattggtagtctcaacaaccctactgtttgaatcactatctttggtttaatcattactattttcttaatgattgccagagttccaggtgccatcttcatcggaatgatcgccgctgctgtttttggcatagtgactggtcaaattcccatgcctaaaggcgttatctcttcagttccaagcattgctccaacttttggtcaagcagtcttccatattggcgatattaataccgttcaaatgtggatcgttgtctttacattcttacttgttactttctttgataccactggtaccttaattggtttggttcaacaagcaggtctgatgaaggacaacaagatgccacgtgctggtgaagctctagcagctgattccagtggtatgttggtcggttctgttcttggtacctcacctgtcggtgcctttgttgaatcaagtgccgggatcgctgttggtgggcgtaccggtttaactgccgtttgggttggtattttcttccttatttcaactatcttcagtccaattttgagtgttttcactacccaagttacagcacccgctttaattattgttggggtattaatggccgaaaacttggcacacgttcactggactaatcttgaaattgccatcccatgtttcttaatcgcattgggaatgcctcttacatactctatttcagacggacttggctggggtttgattgtctaccctgtatcaatgatcgcagccaagcgtttcaaagaaatcacgccaatgatgtggattttgtttattgttttcgtaatctacttcgttgttttaaatgtaaaataattctatcttataaaccctatcttacttttacattaatagatacccccatctaaccaagtagcatgtctacttggtttttatgctaaaaagatgtctgttaatagtatggatgatgacagcagattctattagatgatataataatcaaagaaaggctgtgactaaaatgaaatcatataaaaaaattcaagctaatgttgactcctcactagcacttcaagcagaaggaatttttcaagatatagggctcaataccactaccgcaataaatgtgttcttaaagaaagttgtggcaactggtggtatcccatttgaattaaaagaaactcctgaacaaaaagcctcaagagaattaattcaaagcatctccaaaattccccacaaagaagctaaaaccaaaaaggaaattgaggattggctagatgaggactaatgatattgtagatatttatgttgcttacattgataagcctggaggaaaaaataggcctgtattaataattaaattactaaacagtaaagcttggctgctaaaaatcacttcaaaatataaagaaaaaagtgaaaatatccgaaagcattactttcccatttttgactggaaaaaatataatttagataaaccatcatacattgatactaaaaattatttaatagttactattagtgatttaaatatcgaaaaataccgaggccatttctcaatagcagatttacgcaaattaaaagattttattgacgaaaattcaaactaagaattaaactatatgttttagttcctaaacacaatctcaaatatgagattgtgtttttatttatccaaatggcatcttttgataatcatttgacgccttatgatgttcggattcttctaaattgccgctatactattttcaacaaatcgagttatgaaagatttatttaggaggaattcattatgacaactcaagaaggaaaaactgctttaattactggttcatacggtgggcttggtacccaattcgttaacattcatgcttcacacgggggtgacctaatcctagttggtcgcaatgctaagaaattagccgatcaacaaaaagaagcccgtagaaagtacaacgtaacggcgcatattatcgatgttgatctctcacaaccagatgctgcgcaaaagatctatgatacttgcaaaaagaacggttggactattgactacttaatcaacaatgctggctttggtggtcaaggcgaattcattaaaagaagtatggaacaagacatgtccatgatcgccgttaacattgaaacgcctactcgtttaactaaattatttttacctgacttcgtaaaacgcggccgttatgcctggcccacttcaagccgtttactacgctactaaagcatacgttacaagctggtcaaatgcgttatggcgtgaagtacaaggcacaggcgttacggtaagctgcttaatgcctagcgctatgcaaaccggttttatcagtcgtggtgatttgagttcaactcaattattcgcccatgcggttagtccataaggtgttgcaaaagctgggtatgaagaaatgattgaaggcaagcttaacattaccgctggtttaactgcagcccaaaaaccattcatgaaattggaaccaatgttacctaagaagatgctcatgaacaatgtttataagatgcaagaacaaggtagtagaaagtaatcaacttatcttataatatggatcaaaaggatggtatttgaatgaatcactttattttagatggtcgctatgaagacctactctcttttaacgttgaagaagcacttaaaaaagccaatattcctgaagattgtttcaaaaaactccatccttcaatgagtgaacaacaatactacaattttatggcggctattggtgatcagattagtgatccattcactccaattgaaattgcaactacaaatccaattgaatctttctctccaccaatttttgcggcatatagtagccgtaacggagatatttttatcaagcgtctagccaaatataaaaagctgattggcccattatcttttaaaattgatgaggatagcaagcagctctctattaccctaactccaagtaatcagcaatattccctaccctcttttctagttttatcagaatttgcatttttagtgggacttttgcgcaagacgaccaaagaagctatttccccgctgaagatcacaatgacatcccccgtcaatgatgagcaggtcattaacttctttggctgcaaaatcgaatcgggtaaacgcaacaccatcacttttgccaaaaaagacttgcaggtcaattttattagttataactaagcaatgtgggattatttcaagcctgaattaactaaacgcttatctgaattatccgttgatgattcaactagtgctagagtacgtagcatattgaccgaattacttcctaatggtgaatttacaattgacgatgtagctaaaaagttaggttattctaaacagactttacagagaaagttgagtagcgaaaaccctacttttcaaaaacaactgaactccacccgagaagttttagcgctaaattatttacaaaacaccgatatgacaactagcgatattgcttaccttctaggctatcaggaatttaattcgttcttacgtgccttcagcatctggaaaggcataagcattagcgaatatcgtgaaaaaatgaataaataataaaaagcagatatattttctgtttttttactttataaaggaaataatatgagatttttgctataatttactttataaaggaaataatatgaaaattgctaaaaatttactttatgaaggaaataatatgcagttaaatttaattaaccgcccacagtatttaaatcaattacttcaatttcaaaatacagaattcatcaaagtactgacgggagtacgaagatcaggcaaatcttatattttaatgctttatcgtgaatatttactcaaacacaacataaatgaacatcaaatcatttatatttcttttgaagactttgataatatagatctttatgaacctaaaaagctttattcatacttaaaagaacgaattattagtgaccaaagaatgtacattctacttgatgaaatccaatatgtatcagattggcaaaaagtagtaaatagccttcgacttaatcctctacttgatatcacaattactggcagtaattccaatctattaagtggagaattagcaaccttactatcaggaagatatgtagaaatacatgtttatcctctttcttttaaagaaatgctagattttaaacatatttctgaaccatcagagcgtcagattgataacttatatgatgaatacattaaatatggtggtttccccgcggtagtgttagcaaaagaagaattaaaacaaactattctttctggaatttacaataccattattgtcaatgatatcggctacaaaaatggattaagagaaccagaattagttgcattagtagctaaatatctagcagattcgattggtcaattaattaatccgaacaagattgtaaatacactaaaatcagcaaattttgatatctcttataacgctgtgcagcgttaccttaaatattttgaagaagcatatcttttttataaatctagtcgttatgatattagagggagaaagattctttctactcaaggtaagtattacattgtagatactggtttgcgtacccaagctttaggagaaagaaataatgaccgcggtagtgttttagaaaatatagtttatgtcgaattacttcgccggggctacacagttcaaattggtaaattagataataaagaaattgatttcatcgttttcaaggtaaatgataaacaatatattcaagtaacctaccagcttccagaaaattctactagagaaactgataatttacttcaaattccaaataactacaaaaaaatagtcatcactggccgatatgaaaatgaagaaatgatttccggtattccaataatcaatattaaagattggttattaagctctaaaaactgatcaaaataggatcgactaactcatgtcgatcctatttttaaattaaattatgttttttacaataagtaaaaattccgtcatcttgcacgctgccacagatgtcatcagcaatttccttcacatcgtctgttgcgttccccattgcaacgccgtgaccaacagtctttaacatttcaatatcgttgccgccatcaccaaaggctattgcttcgctcacagggatttgataataatctaacactttttcaattgctacacccttactaccagtagctggaataatatctgctgctctatcccaccaagctgttaccttagcattttgcgtattagctacaagtccgtcataatctttttcacgacagcctaccattatttgataaaccgtatcctgatcgacaaccacatcaaaatctggcgccactctcaaatccgttccaccaatagcaaagtattcctttaaatcctcatcaacaccattagctgcaatccgtgttttggtagctacagctaacggccgatttattttctgagcattttgaatcatatgcaagacatctccttgccttaacggattatcaaaaacaatgtcttgatcgttatagcagtaagaaccattaaaagttaaatatgcatcaaaatctacacccaacttaggcagttgcactggtggtctgcctgatgcaatacaaatcataatgccgttgtcttgtaaagcatgcagtgtctctagcattttaggtgtaattgattttttcttttcaattaaagtaccatctatatcaaaaaatattatcttaggtttgctcattatttttaccttctaaagaattttctactaattattatactttaaccgatatttcccaggaaatattaaaattgagctctcttcctcaacatctgtgctaaactagatacaattagcttctttaaaagttaatagttacggaggaatttttaaatgcagacattggaaaaagtctttcatttacaagatgctcataccactgttaaacgtgagttaatcgctgctttaaccacttttgtcagtctctcctacatcttattcgttaacccaaacattttgcacgcagctggtatccctaaaggtgccgcttttactgtaacagctcttgccacagcagttgggtgttttttaatgggttttattgctaattatccgattgccttagctccaaccttaggtagcggtgcctttttcgcttataacgtatgtgttgggatgcatatttcttgggaaacagctttggctgcagtccttgttgcttcagttttattcattttaattactgtctttaaattacgcgaattagtggttaatgccattccacaagatatgaagtatgctatttcagcaggaattgggttattcatcgcttttattggcttaaaaaatggtcaattaattgttaacagcgattcaactttagttactctgggaaaatttagtactccagcagtttggatcacattatttggcttaattttgactgttgtattaatggcattaaacgtgcctggttctatctttattggaatgattgttactgccatcttcggtatgatcattggtcaaattccattaccacataacatcgtttctggtgccccaagtattgcaccaaccttcggccaagcggtttttcacattaaagatattaatacagctcaactttggatggttgtactaactttcttattagttaccttctttgatactgctggtactttaattggaatgactgaacaagccggtatggttgacaaggatggcaagattccacggatcggtcgtgcttttttggctgattcaactgctatggttgaaggtgcagtctttggtactgctccacttggaacttctgttgaatcaagtgccggaattgccatgggtggtcgtactggtttgactgctatctttgttggtattttcttcattatcagtatgattttcagcccattgttacaagtaattccaactactgtaacggctcctgctttaattatcgttggtgtactgatggccagcaacttaaagaaaatcgattgggaaaagttcgaaattgcctttcctgcttttcttaccgttgtagggatgccactgacttactcaatttcagatggtttggcattaggcttgattgcctacccaattaccatgattgcttctaagcgttataaggaagttagtcctatgatgtatatcctgttcgtagtatttatcatctttttcttagttacgaatttataaaaagaatgctaaagataagcagtttgaagctgcttattttttattgacttgatttttattttgtactactgtaataaatatataagacagtttttatgggagaagaaaaatgagactgtaaaatagtttgtgtaaggatgaatgattccttaaatttatttctttaaacattagaaaaaggagttcctttctcgtatgattggtttgaacaaaaaacacatacagaaagaagaactccttcatgaatgattttaccaaaaatatggctcaagcactattcgatcaagacaaagttaatgattttttgcgcaaggaaattcaaactgcagttaatcaattgcttaaagttgaattgactgcctttctgggctatgatccctatgccagaaatggctggaatactggcaactctagaaatggtgcttatttccgcaaagttgatacgcaatttggcccaattgaagtgcaagtgccccgggatcgcaacggtcaatttcatcagcacacgctgcctgactacaagcagcactcggatatcttggaaagcatgattatcaagctttactccaagggcgtgaccaccagggaaatagccgatctaattgaaaagatgtatggcagccattatagtccagctcaggtatcaaatatttccaagcagatgctccccaaggttgaggcttatcacaagcgcaagctaagcgacaagtttttctgtgtctatttggatgcgacataccttcctttgcgccgagaaacgtttgagcgtgaagcagtatatattgccattggcattaaacctaatggacataaggaagtcattgactactgcattgctcctagtgagaacattgaagtctggacagatatgcttcaaaacatgaaggccagaggcttgaagcaagttgaactctttctttctgatggtgttgttggcatgaaaacagccttggccaggacttatcctaaagctcattttcaacgctgtttggttcatgtcatgcgcaatatctgcgctaaagtacgcgtcgacgatcgtgaaaagatcatgaacgaattcaaacaggtgcatcaacagacaaacaaagaagaagccacagctgtcctgcatgacttctataccaaatggggcaaggtttacagccatgttatcagaagcttgaaagacatagaaccagatctgctggtcttttataactatcccaagcagatcagagcttcaatttattcgactaacatgattgaatcatttaacaatgtgatcaagcgcaaagctaagcctaaagcagagttcccaaatgaacagtcgcttgatacttttattggcattcaagcaatgagctacaacgaacgctatttcaatcgaatccacaaaggctttggtcaggttcaggataccttagaatcctactttgattaaataaaagattaaaaaatcaatttacgagaaagaactatttacacaaaagatttgacagtttcagaaaaatgaaaatcaaaaaagtactactgaccacgtctttactcacgattagtttgattactctatcgggatgtagtttccacctgtttaccaacaagaattccggtcctacaatcaaacgaactttgtcctctaagaaattcaattcacttaaggtagccagtgacattactgatgttgaattacatgcaagtaatcaatacaaagttatctatcatgggctcaagcgtttcaaacctagcgttaatgtgaaaaatggtcagttaaagatcactcaaactagtaatggtgtttcttataacatcaaagaaggcaatacagtggcaatctacctacctgccaaagaattacaaaatatcaatattaatctttctgatggcgatatcgatgctgatggcaaggttcaagcaaaaaatgtcaaacttcacagtgacgatggtgatgtcaactttgacgatttaagaattagctctggcaaaattacctcagatgacggcgatatttcagtttctaatctacttactagaaaaggcgccacagttgaatcagatgatggtgacattcgtattagaaagagcaatgccagtggttaccgcctaacttctgacgacggtgacgtcacattcaagggagatacttctgataatgatgacggtggttcttactacaaaaatactaagagttctaacctgctctctgctcacagtgatgacggcgacgtcaacgttaactaaatttcgtcataaggcgataagtttcacatgaaacaaaaaatcaatgcatcattgataatgcattgattttttacttttttcctcattcatagcataaacacgactttacaagattatttaagtttctattgaaatagacataattttaatacgaaaaagataagactaaattctacttttccattaaaaaatatttaccaattttccattttctaagtcaaaatgatgcgtaaatttcttcatcgtcgttgatgaaatatggtggtcaatttcaattactgttaatggtgaattcaaaaagacattatgaatttgctcagcagtttgcggatcaagtgaagcagttccttcatcaactactaaaatttctctttggaagagaaaagcacgcgctaattcaattctctttctttccccacctgaaagattatgcccattttcttcaattacggtatctaagccatgtttttgaaggtaattagttaatcctgcttgttgagccgcagccacgatttgcttttgatcaaattgtttaccaagagttaaattaaagcgtaaagtcacattaaaaatttgcgaagattgttgaacttcactaaaaatttgcgtttcaacagcctgatcattaaccaaaactcttcccttctgcggagataatttacccattaacaccttaagtaaagtagatttaccttcaccagactttccggttaacagaattttatctcctttattaacacataaactcacattattaagcactggactatcagcttgatagccgaaagttacattgtacatatttaattgcttaaatttgactggagcttcatcttgcttagtcgttaaaggcttgaaagataacaacttagcggtcattggtttagtagcagcaatctgattacgaatactattaatactaaagaaactatttacaatccaagcgctagagtattgaacggcaacaaaagaagccaaagcaatgtgtccttgaattaccataataatgccgattccaattggtaagaagtctagtgagtaagctaataaatcaacgtaaaaatcacttttagcaattgtatcgtcacgttcacgtttattctcaacagaatttttaattactttactacccttctttacaaatagagataatacattgtaatttaaaaccgtattgatatttttgagtaaatccgacataaacgttacataactacctgttgatttactccaattggatgactgattggctgttttcttgctaaacaaactaggaataaggcttgaaagactggcaaaagcaacaaagactaatgtcaggactacactatttatcagcgcaatagtaacgataccaacaattttaaccacagtagatactagtgaaaataactgtctaaagtacttttcttcaatcaggttaagatcattattaatgaaagaaattcgattagaaatttctttttctcctgtttttacaaaatccgtctgcatcagatactcacgaacttcttgattaaatagtgctacattacgattaattactcgattatttaagtattctacaattacaagtaagatttgcaatactgtaattacgataatcattctcaccgtatttggaatacttttacctgtaattaacgcaaaaatttcggagtatgaccatgtgctaaaagacaaagataatccgcttaaacatgacagaataatactgagcgaaaaccatttgaggtcaataaactttttcataaatgaatctccctttcaattaagttggattcattatctgctttagttcacgataaaaatagctttctgcaaaagtgatcttcaatctgcatatatgcagattattctggaagaatagacagaatattttctaaattacttgccttgatcaatttcttaatagctaatacctgctctgtatctccagcaaaatagcattgataaaaatgaccaatgattttatataagactaaagatggcgtttgacttaattgcccaagtaaataaataggctctttattatcttttacaaatttattttcagcacaagtatataaataattcacacaaatagtggcaattgttgtttgcattttttctgtctgctcagacattttatcattataagtagtgaaaattttttgaaagaaaaaagcaaaatcgtcatgagtaaagatagaggtaccaaaattggctaacaaatctaaactaaatttatcttgaagccaattgtcgcctgcaaacaagcgttgcagtactatatttttatctttgacatcaaatttacgttttccttctagcaaggtaagaatcaacttagctttgattttcagaagatcatgatgaggcagttgttgaatttctgttaccaattttctaacttggttaaagtcttgattataataagcagtctgtaattgatcacctaaattgttttcatcgtcagcttgtgcgactgaattttgcttaaagaattcatcaaatgaaattttatttttctgcaaaattgccattaagtccttagctgatatttcatgcaatccgcgctcaatcttagaataatgggcaggtgataaaattcctgctacaaattgttcttgcgtcagtccccgcgattggcgcgctttttttaatgctgtgttaatttccatagctgtttttatttcaatttacggtcccttttagatacaaaccaaattgtcccatcagaagttgcccagtgtccatcagaagttttatgaaatttcagcgtcagtttcttactgtgtagtgtccagctatttttaccttccattgtgacacggacccggcctaatttttctgaatttattttgttattgtagtctttgggatcatatgaattatgcccatatactttataaattgcttttgctgccgcagtatttggcttaatgtatttataagtaccagatgcatcagtcttaaaaactgggctggatgcatcgatttgaccactatttttccccagagctatgttcaccaacatgccaagatgattttccattacagaatctgtttgatggggatcataggttgtaagatttttattagcaaactgttctggaatagtttgctgattgcgataaaacaaccagccaccgactgccagaactacgactactacaacagttatgattgtagctttctttttcataaaggatcacctgttatctatcagcttttttctgaaaagtaattaatccgtgtgaaactaatctaacagttccgccataataaactacccaacgtactttgccattactgtactcttcatacattctctcccgctgaagatatccattatatgtaccatcattataaggaatttccatcggagtatctacagcaccatcataagcgccataacgcgtcttatgccatgggcctgttctcttaactccatgaacttttttagttaacggtagtttttgaacgttttaaactgaatctgtactagattccgcagcagatacaacagcagtattagtggttgcaaacagagcagttgctgagaataacactaaagttgcttttcttaatttcatatctaacaccttatacctttcttttattgtttattttcattacctagttgttcattatcattgacaacaaaatttgtcatcattttctttttacttgctaatgtaggaattgggtagcttttaagtttagtattatacaaatagccaccgtacataattcctgttggattatgccccattggaacagtgtacatcttttccagatatcctctaaatacctcattgcctcttcttacagtgtaataaacataagtaccctgatcacgatagtattgacgttgataccagatatgttcaacaaatccttttgattcagtgctttgtgttgcagcttgtacatggtttgattgaaccaaagctgaagttgaaactgatactagtgataaagctaatgctgctttagctgttaaagttaaaattttcttatttcttttcataactttaacctactctttttttcttttcttgctttaattactacctaatccagacggaataggaacccatggacccatatttttctctcctttcttatttatttttcattaattttactttcactactaagaactgttcagaaattgtcaaagatgacaattttctacaataaaattcttaatcaaatgagacattccattacttttcataaattcaataatctgatctacttcttcatttttgccatcaaaacaataatggtaataattggcaactattttagcaaaagcattacgtggaatttctggcaatttagaaatgaaatcgtaaattagatttaaatcaattttccttctttgtacgtatacattagccaaataattaatagctattgctgacattatttcttgtagttgaccagacagattagatacattatggcgatacgttctaaatattgaattaatcaaaaagtccatatcttctggggcatatatcatcatagtcattgcaaaaatttgtagagtagattcactccactcatcagaatcaaagacaatttgtctaacttgtcgtttaatattctcagatatttgatcaatttgtttctttaaagatgctattgaaaataccactaaagcataaagattaaatatattctgactttgatttttatattttccaatttcaattttcaaatcttcaagtcgttcgatctgctgatgataatatgcatcttctaattgcttttgccagatcaaatttttgtgagcaagatcattttcactatcttcattttctattcgctctaaaaatatagaagcttgcaatccatgttgctttaacaaatcaattaaatcctgagtctgaatatcatttaatccacgttcaatttttgaatagtaagatgttgataacacatcccccgccatttcagtttgtgataatttcatactttttcttgtttgttttaatgcttcaccaattgtcatatctttccctccctcgtattatcatatttttcattattgtataatgttttgttaattttgcaatagtttgtaaaacaaaagcattatttttattttttaatcttttatgtttacaaatgtaaacttagcgagtagaataaaaaatgtgaagagatgaaaataaattatttaatttggaggttacggtcatggatgtaactaaaatcattatccttgttgtcgcaatcgccttgatcggctttatcctttggtggttcttcggcaaacatgacgaagctatcggtaaagcaagtgttaatcaaggcacacaagaagctaacatcgtcgttaacggcggttactctccttctaccattgttttaaaacaaggcgtaccagctaaggtgaattttgatatgcaagactctaccgcctgtttatctcatgtcgtctttgaacaacttggcgttgacaaagatttaactaagcaaaaagttactacagttgatattccgactgataagaaaggtacatataattttgcctgcgggatggatatgttccacggtaaagtcattgttaaataaggagtttacaaaatgagtattttttcaaagaatcaaactaaaaaagttgttgttaatgcagaaaatcatggttataaaccaaacacagttactttcaagcaaggtaaaccagctcaattaaagtttattccatcagataatatgggctgcatgaatgaagtagtctctaaagatttaaattttgaccaaaaattagatggtaaaaaagaagttacgattgacattccaactgacaagccaggtacttacacctacgcttgtggaatggatatgttccgcggaaaggttgttgttaaataatgaaactttcaaacattaagcgcttctggatctcatttattctagctattccaatgctaatccagatgttcgccatgccctttcactggatgatgccaggctataattggatcgcttttatcacgactacaatcattatggcgatttccgctgccccttactggagcagtgcttgggccgcttttaaacaccataacgctaatatgaacacattagtagccgtcggtacttctgtagcttacttttacagtatctttgctatgtttactggacgtgaagtctactttgaaagtgctgctttcgtcaccgtcttcgttttgctcggggatgcaatggaagaaaagatgcacaataatgcctcgaatgctttagctaaactaattgatctgcaagctaaagatgctgaagttgaacgtgatggcaaattcattaagttgccactagatcaagttaaagttggtgacatcattcgcgttaagcctggtgaaaaagtccctgtagatggcgtgattgttgacggttcatcgactcttgatgaatcaatggttacgggtgaaagtatgccagttactaagaaaaaaggcgacgatgttgttggctcaaccatcaatactaatgggacttttaccttcaaagcaactaaggtcggtagtgacacgatgctttcgcagattgttgatttagttaaaaaagctcaaaccagccatgcgccgattcaaaacctaactgataaaatatctaatatctttgtcccagtcgttttaattattgcaattattaccttcgtaatttggtatgttttcttaggcgcaacattggttaatgctatgctcttcgccgtttcagtagtcgtaattgcttgtccatgtgcactaggtttagcgacaccaactgctttaatggttggtactgcccgtagcgctaaaatgggcgttttaatcaagaacggtgaagttcttgaagaagttagcgacattgataccgttgtgtttgataagactggtacaattaccgttggtaagccacaagttactaatgttgtaggtgataaaaacaaggtcttaactattgcagctagtttggaagaaaattctgagcacccactagcaaccgctgtagttaaagctgctaaagaagcaaagactgaaattaagtctatacaaaactttgcagctattgaaggccgcggagttaaggcaaactatggcaatcaagaagcttttgttggtagcgatcgtttattagaagatatttctatttcccaggaaatgaaagatcaggctctccaacttcaaaaagaagcaaaaactgtagtctatgttggcctaggtaatgacatcattggcttaattgccattcaagatgtacctaaagcaagttctaagcaagcaattgcggaacttaaaaagcgtggtttaaagacggtgatgcttaccggtgacaatcaaaatgttgctgaagctattggccgtgaagtcggaatcgaccaagtaatcgccggtgttttaccaactgaaaaagccgctgagattaagaaattgcaggatgaaggcaataaagtagcctttgttggtgatggtattaacgacgcacctgcactgtctacagctgatgtcggcatcgccatgggatcaggtaccgatattgctattgaatctggtggcattgttctcgttcaaaatgacttaatgggcgtagttagagcgcttgagatctctaagaagactttcaacagaatcaaattaaacctcttctgggctcttatttacaacactattggtattccaattgcagcaggtttattcatggcctttggtctgcagcttagtcctgaacttgcaggtttagctatggccttctcttctgtttctgttgtaactagttcacttttattgaataaaacaaaaattgctggtgaaacagctcaagtttcaaagtaaaataattctccgaccggatattttaatccggttttctttttgtaaatttttcaatttgcgacttaaagtttcagcagtaatacccaaatatgatgctaagtctttcttttttaactttaattccacatttttactcccctgtttttgagctaagtcttgcaaataggccattaagcgttcctgagcatccattgaattgcgccgaatagagttagtttcgattgtaaccagctgctcgccaaaattattaagcaaattcaatgctaaatctggcgtctttttcaataacttttgaaaatcacgacgctcaatagaacaaacataagtatcttgtaaagcctgcacaaagttttcctgggcatgttcttgaaaaagattctgctgtccattagcatcgccttgattcagcacacctaatacggtctctttaccgtcttcgttgagattgtaaatcttggcactgccttgatccataaaaagcattccgttcttaccatcacctggttgtcgaataatactgccttttggaaaatattcttggtgcgttgaaattggtactagtttttctaacatttcatttggcaaatttttaaatatggctgctttgcgaatacaagccatgggtgaatgttgcataaaagcctcatttcttgatctaagtcaatttatttttatctgcatcttaatacaatgtatttaacaactcaagcagaaaggaaatattaatcatgactaaatacatcgcacatattgagcctttaaacgctaaaaaaattggtaccaaggcacacggtactgccacttttgaaaaaaaaggtgatcaactacatattcacgttgagatgtttgatactccagcaaatattgaacactgggaacatttccatggcttcccgaatggtcaaaaagctcatgtaccaactgcagctcaagacgttaaccatgatggctttattgatttaccagaaactgagccggtctcaggaactacaatggtgccacttgatgatgccccagaaaacatgaatattcctcatgatggttatcctgttgccgacagtaatggacattatgaatatgagattgatgtctcattaacaaagctacaaaagaaattcaaagctgcctttggtagcgataaactacaactagacaagcgtgtagtttacgttcatggtgtacctgcagatctggaattacctgatactgtaggtggttgcgtaatgagttatgatgcccatactaccttgccaatcgcagctggtgaaattgaaaaagcttaagttaaaagccattccttgtgaatggctttttgcatcctttcttattttttgatagcatagatatagattatgtaaaatatctaagaaaaggagatgttttataagtaggcttagatcctactcttatggagaataacgaaaaaattatccaagaaaagaaacgcgaaaaatttattaaaactaaaaagaattacaagcgtgcaccactaatgtcagttcacttaagagtgatgatggccgttatcttaggtcaaatcgcctgtggctattccctgggaattagtggtaccgctctttctaatgcagctaaatatatcaacattagtgacttctggactggattaattggggctggtgctttaattggccttgctggtagtcttttggtcggtcgactttcggataaaatcggtcgccgtaaactcttaatgtggaatatgtatatattagctgcttttttctacccaaagtcaagtattatcaatgatttaagaaaataaatttacttgttttaatgatgcgaataaggttaaagcaaataagagtttaaatttaagaaaaagcgaaagtaccacaaataagcctatgaatacttgtagtttttccataggttgcttatacttaagttgattatttgatttcagctaaagtcttttattttcggtggctatgttgtaatcatataattgatcatgtttgataagagcaaacattgtgcgtatcagtttatggactgatgcaatggcgattttcttatagccttgtctatttgaagatcgttttttcttgtcataataatcagttatatggcaaggctgcgtagcctttaccgtctccatttgagtaataactcgataaagtatttttctggcaatatgattgccatgcttggtaatgccaagagaactgtctttttcaccagattggtaccttcctggatcaatgccaacaaacgcatcaatttgagctgaagtgctaaaccgtcttagatcaccaagctctgctactaatctcactgctgtaattctagcaacccctgggatactcaaatagatggataaagcacgagcgtttactgctttagccagcttttccatgtagttaattacatagtcgcgttcttgctggagtgaaaataaattagaaatgttcctttgaatagctctaacgataatactatctttggaatcataaggataagcttctctagcaaaagcgtataatcttgtggttaagtaccgtgccctttgttgtcctattccagaaatagaattaagcatttgagttacctgtgtctcattcttttctagaacatatccagcatgtgggaaaagactaacaagcgcccaataaattctgccagatggatgagacagtatttcttcaatttgtgggaaagtggattggaggttgcggtgcaattgatttttagtagtaactatactcctagtaagttcttcataatagcgactggcattctgaagttcatgatactctctgggctgtggatcacgcagcttttgcggggcattaaattgaattaaagccaggcgataagcatctaccttatcagttttattatggcgtaaattattgtccattagctttttcgctttaagcggattaagcttcaaatacttaatatgataatcctctaagaaagcttgcaggcttagagaataaacaccagtagcttcgaaaacaactaaaggagttatcaaatattggttcagttgctcataaagtttttgatagccaaaggaatcattagagattctaaaagattcgccttgtttgatccggtcattaaccacacaaactgtggaagatttactgctaacatcaataccgaaaataatttgtgattccataatataacctccgctgtgaagataaacctctttatcaacctattaattctaattttctaaacacggcatctaagtgcccacagacttcgaagagacttaagaataggtggtaaagcagtccgtttcttttacgacatcaagtgtctaaaaagctgaagacttgatttgctttatcttcactttctattttagacaaaataaaaagtgccagatcgtgaatccgtcgattcatgatccaacactaggttagtatgtttctttattacatctaataaccgctaattttagcttaacctttatcctccgtattggaattggtttaatgattgctgttgactatactgtagggaatgccttgttaaccgaatggctacctaagggcgaagacagcaaacgccagagtcatttattaatctattggacaattggttttattttgtcctatctagctggtagttttatcactggatttgatagttatacttggcaaataatcttagcaacaagtgcagtacctgcactagtaactgctatcttcagaagtcttttcccactccctgcttcaccaggctggctagcaagtaagggtaagattaagacggccaacaaggtcattcgtaagcacatgggacgcaaatggagattacctgcccgctttatgaagcggaataaaaagaaaacgcctagaaatatttcctgggcaattttattttccaagcaatatctgcgacgtactctagtaggtgggattttctatgcctgccaagccttctcatttttcggtattagtatcttcttgccaattttattacaaagcatgaatatcactagtggaaatatctcaggaattatctacaatggtgggatgttcattggtgtgctaatcggtacctggatctttaacaaggttagccgccgcttctatcttatcagtaattttctaatctcaggtctgctaatcggcattttagcaatagtacctaacttaaattcaatacttaaattaggtatttttacgttatttgcgattattttatcagctggtttgatcctagattatccttatccgactgaattatttgatctgaaggtacgagcaactggtgtaggtacttgtattacaatcagccgaatcggggctgccgcagggactttcttattgcccgtcttaactaatgtgggtggtgctagcctggcaatgctagtttgtgcgattgttttactctttgcctttatcgtttgcctcatctgggcaccagagacctcaccccaatttatgaaaaaataaaataattaatatgctacacaaaaagacagattacatatgatgcaatctgtcttttcttatttcttatcttttttcttcttgtccttagaatccttatttaataattcttctggatccttatgcttaggcgtcttctttggatctggtacagttgcaaagcgatcaagcatcttctgtaagttattagggttgtcaaaagttaatcccataaaacatcttcctttcgttttctcaattatattaaaatttcaattcaaatgacaataattttaacccttattatcaataaattgttgcatcttaatcatttctgaaccagccagatcaacactaattaaatcactataatcatgaacactagtatctcctaaaccatattcagttacaatttttaggtcgaagccactatcagagcgatcttcaattaagcctaaacgatcaggataatgataaattgaatcactaattttcactatttgatcttcgggccaattatcaataatttctgctggtgactgaatttcatcccgtaatttaactgaacgctccagcctgtccggatcaaaactaccattatttttttgccattgaactaaaaaattaaagaagagcaagcgctcggaatcttcagtaatatgcgttatatggctcctagcaatcactgcaattgattcaacctgccctaactcattgatgctctcgaataccagattatcatcgtcatacttgagtactttaccaatagcaaaactaccatattgatcatcaaaggtataatcaaaataaatttcaaccagatccaagtcgttagtgaattcttgcttctgtgattgccgcaaatattgggtaaataagcgattatcaatggcattagtatcgacacaaacaatatcgtcaagtggtataacggtggcataatgctctaaagttaattcattgcgttctaaaatacgcacctcttgctgatcaagttgagtaattaagccagtgtaagtagcacctgtattcacctcaaaagttgtaaagggttgcgtgtcagctacgttaatcagtaaatcatgcagattagtaaaatcccaggctaacactgtcttatttaattgctctaagttaaatgaatccttaacttgggtaatcatataatagcgtagattaggcgtatcgtcttcaatcttagctacttgatcttctttaataaagactattccacctaaattaccgccttgatcgactgattcaaaggtaatccagccatgatgttgcgtgataatgcggccaatatagtaagaatttgcatcaactaccgtaatacttgcatccccatctaagttatatttttcttgatcagccttaagcgtgatttgtacaagtttattcaatttttcgccccctcttttttcttccgtgaatttaattgtcgcctaatcattatttttctgcaagaaaaaagaagatggtttagccatcttctaatattgagttaattctgtagaattttggggctaacgaatattacttcttttgtgcagctgcctcagcttctgctgctgtgtttgaaggggttaacgaagtactgtttggatcaaaacgcacatcgcttgcttttacataaccatcagcaaattggacttcaccttgattactatagacagatttaccaactaagtgataaaacagttctgccttattttcacttggtacccagatgtaaagcaacttatttaccttgtatcttccaccttgttttctaacttgatcgcccttgaagtcaatcttgtttccgttagcatcatagatatcagttggcttaataaattgaattagtgattttttagtatgataataattttgaactggaatatctttagcagctttaacattgaaattataaatccaataatcagttcccttaatatgatagattgctaattcgttgtcatcgtcaccatctctaccagtatcagcacgtgtcccttgctctaaacgatccactgtaaacttatcaccttgttttgcgtattttcctgaaggctgaactgcatctttatcaggtacttcaacaaaaagagcagcacgtttatcagttacagtaacagtcgtttcttctgatttagttgtttgagacgaagaagaactagtgttgttatttgtattaacactaattacaggacctaaattataagacttaatgtactgtttattaggtccacctattctaaagtaatgctttccgttcttaaatttgtatgaaccgccataagtcgtgatagtttcacccttatacaatttccaacggttattgtaagaggttctgccagttgaggtacgataaatgtaagtattatgagtaatcttacgtgttacaccatcaatgttggtagcctttatgtattgatccttgccgcttactttatagtaaagcgagccgtcaatttttacagggttgctttcaacagtgacatattgataggcattgtattttacacctgtgctgttaccatccttgtcgtaagctaaagcagtatgcataactgctttagtcgtagcagcttgtacttcattagttgtattagtcaaaacagccaagggtgcaactgtcattaatgtagctgcagaaattaatgcaatcttatttttcttcatcataatcatccttttcaaatctctacactgctattatattctctaaagctaattaaagcattaaaaagaagcccattaagtgaagtggacttctacttttgatattttcttttaatttattttttcaatgccgttgcctcagcttctgctgctgtgtttgaaggggttaatgtcaaacctatattaacaaatttaacatcactagctttaacataggcatcattaccgacttcaatttgatcaacgttacctgtagcatagaacttagtaccaactaaatggtagaataattctgccttgttttcacttggtacccaaatgtatatgagtttatctactttcagatttccaccttgttttacaatttttgcgccattgtggttttgcatagtaccgtcagcattatacacatcagtatccttgacaaatttgatatagccataatgttcgtgatcataatcatgctttactaattttttatcggcagttacatcaatagctaaaagccaattgtctgtaccttttattctatacattccagcttgtgctgcagttgatggaaaatgatcagcaaacggagtaacttctagtttatctacaataaacttcgtaccagctttgagattctttttgattgctttaccttgattatcataaatatttacaccgtaagcattttttacggtaacagttgcttcctcggcattagtattagtagcgttgtttgattcattgctggttaaatttgatgcagtattagtactaataactgggcctaaattatatgatctaatatattgcttacgtggcccacctactctaaagtaacgtttaccgtttttaaatttatatgatccaccatatgtagttacggtttcacctttataaaatttccatttcttactgttggcagtcataccataaggtgtcctttgagtagaagtccggtatatataagcattatgagtaatctttcgggttacaccatcaatattagttactttgatatattcatctttatctgtaactttgtaatattgacttccattgatagttactagttttggatctacatgaacactaccataaacgtaatatttatgaccggtactatttccatctttatcataagctaatgcgttgtgcataatagtcttggttattgaagaatctgcttgtactgtatgagcgctagttgtagtactcaggataggtgccgttcccattaaagctactacagaaattaacatgattttattttttctcattattaaccaccctttgaaaatctctatacttcaattatcttactttgtataaacttagacaacaaaaatagcatcaaatcatattgatttgatgctattaaggctaaaatttacaaatttagtcccaagctaattcataaaccttatttgaaacagttttatttttaccgttaacattagcatggtatgcaacagttaagtaaccgtgattttcatcaataatttggatactttcaacttcactatgttcacctgaaatatctaatccaccaaatgcacttaagtttacattttcccattgagattgatcattacgtgcataaaacggaatttttacaatttccttgtgatagtatgaccatgaaccattacttaaacttggtgatttttgactagtaatataaatattaccagaattatcaagatcataaccttgtacagagtttaaaacagatccatacaaaccatatactgtaaaactagtttcacattgataatttcccatatttacgaaaccattatttccagcctcatctaatgcattattaatgacatttaggtcataaattgaaaagtggcctgttccattattctcaatagtagcaattaaaagcatactataatctggtgaaactgctacttcagcgcgttccatttcatcaccagagcattgatcttcaggattacctgcgcggttcaagtatgctaaacgtgggaattcagtatttgatgaagcatatgatttgtatctaatatctgctcgagcaatttgagaagcccatttattcttgtttttagtaccaacgaaccatttaccagatctacctgaatattcccaagtttgggtgtgtccagctgctgcacctactaaagtaagcacaggggttgtcacgttgccacggaagccacgcaatacatgtgtttctgtctggttatttcttaactgtaaaccataaacatactttgatcctacattacctttttgaactacagctctgtaacctgtattcatatcgaatctatctaaaattctaatatttgttgcatctaacataataaaacctccgaaaaatttaaaaactactacttatcctgagtttgctcattcatctgtttagccacttccgcaaagatctcctgcacttcttgcctgttcagcttgaagccttttgcttcaaggctgttcactactgcgttgccaacacggttaatcttctgttcgtcagaaagattttctttgtcgtataagcgtacatagcttttcattaaactatctgcagtattgcggaattgctctaagcgtttattcttgaaatgaactctgctcaagatgccaatacctactacgctaattacccataacgccagagtaatcagctcaacgtaatcatgaatatccataattgaatgaatcacctctcttttgatcaaacgatccaagggggctaacgaatgtccattggacttcacctctgtttgataatgttcaacaagacactaatacacttgatttatattagtttttagactaatataaatgtataagaaataaccgaaagctggtaaatgttccgccaagaattttattaacttaggttgttttctttttcatatctcgttgacaatatttactataagttaattaactaattatgtcaataaaaaagctaaaaaactattatttttttcgaacaagtattcctgaaaggcttggtatgattgagttagagcgcacaaaagaattagcaaaaaaatacaaaatgaatctccgtgaagtaaatgacaaggcaggtttaggtagaaattccatctataattggaagaatcaaagaccaggaattgatgcacttaatgcagtcgcagatgtactacatacgtcagccgattatttaagtggtaagacaaacaatcctagcccgtcacctaaaggtgatgaaactggtggtatttctattgatggtgaagtaccatatttctatcatggctacactattccagaagactacctgaacatagttcgtcaacttatggaacgtgatatcaaaaaaggacttattaaacgacatgacaacagcagatcagaataaacaagaactcatagactggttattagcctatgctaaaaaacgtgatattatggttgaattagttgaagtaaatccaacttacccatccatttctttaaagaactatagattcgctgtcattaatactaattggcatcatcaagaagaagtaccattttcaataggtcatgagattggtcacattatgctgactaatggtgaagtagattctcgtcaatatatcacttttacagaacagaattccgaagaaagtccagcagacatcttttcaataaagctaatctataattactcctgcaaaatgggtgattgcttcgaagatacaggtttatttatgcaagcatacgggataccaaatcgagtagctgatgcaactaaagagatatttaagcgagcagcttaaccatcaacttctatattgatttgattactaaaagttttagcattagtttttacactacttaaaatccaattaaacaaaaaatcgctactcaattgagtaacgattttttctatccatccagttcaacgccttgcaagtccttcatcttgctataaaccgcgccacgttgacttgaatcaaactccagaataagcatatctccgccgcgaattacggtttgaccatttggtatgatctcatctccatcgcggtgaattgttcttaccctagtatcaaccggccattgaacctcagaaatggttttatcaaccagtctactgctctcatagaccggcagagccattgtatcagcctgaccagtatagttagccttatggtcactactcttgtccatagcggctgctagaagcccgtagataggcttaccgccaagaagttcatcaactaataacgcaatgaaggccaccacagctaatggcatcaagtgaagtaaggaccctaccatctcagtaattaagataatcgccgtaaatggtgcacgaatgattgctgcaaaatatcctgccattgaaaaaatcactaggttaactactaaacgctgcggtaacaagcctaactgtaccatcatcagtccataagttgcaccaatcaaagcgcccattgtcaaaattggcaggaagataccactaggaagacctgaatcataagcaacaatggagaaaacaattctcatgacataatagaaggctagcatccctacaatgccccaacctgttttagtgattatattcggcaatgccagaattaaccgattacctggaccggtgattaatggccaaaagtaagcaatcgggattaatattgccaaaggaataagtccatgcagccaacgaggtaaaatggtgattttagcatagaccttctttaaactaaataaaccaactttatataaatgacccaataagcctaataaaatccctaagataagcaagtgccagtacaacgaaatcggaaatgaatagttatattgaattgctagggcgtgacgaatgccaaacaagtttgaaacgacaaagtttgaagcaattgcgccagctaaagcattcatccaaactaatggtgaaaagttatggaatacttcttctaagacaaacaaggcaccactcaaaggagcgccaaaagcggcagacaaaccacttgaagcccctgttgcaagcagaattctagtttttaatttgttctgcttgcatccctgagcaacaccttgaccaattgtcgagcccagctgcaatgatggtccttctggtcctaggaatagccctgtgccgataaccaagataccaccgattaatttccgccataaaattggaaaccattgtagtgatagcttcccttgcagttgcaattttacttctggaataccagaaccaccaacatggggatattgtttaacaaaataaccagcaattaccgctaccgcaataaagccaatgataatcgcaataaaccacaacggattctggtgcgctaattgaaacaagtataaccaaaaaccagatgtcttttcgattccaaatctaaataaaccaactactacgccggtacatattccgacaagtagtgcttggagcaacagtttaatattagttctgtttgcctcgtctttcattactttctccctcacaataaaaaaaacgtgtcacaaactattgtacaacaaaaagccagctagaaatgttccaatgtcattaagttaagacattgacaattaagggtgcttttttagagatcgaatcatttggattcgatctctttttttgtataaaataaaggcgaaaagaccagccttttcgcctatcttatatattatatattttaaaccttcaaaattattgccagaaagatggtgttaattatgaaagcccttcataagaatattctagaacgtcttgatcaaattatcaataatactggggatcatattcacgattttattaataatcctcatgcttttaccaggaaacgcactttagatgcagcgacagtccttaaaactacaattaacatgcaaggtcagaatttaaacagtgaactctttagagcttttggcgaagatgcaactaaaaagaacgataaagtagttagtacttctgcctatgttcaacgcaaaagccagctttctcctgcttgttttaaacatattctgactgtttttaatcaaaatctatttaatattcaactttttgatcatcactaccgtttgtttgccattgatggctctgactttaatcaaatctggaatccgaaatcgaataacattgtacaagcttcttctcataaaaagaaaccctattgtcaaattcacgttaatgccttatatgatctattgaataatacctaccaggattgtatttttcagcctaaatcagaaatggatgaacgcaaagcggctgttcaaatgcttaaagctttgaattgtggtccatatattgtaacaatggatcgtggctacactagtttcaatatgattgaaaactgcaatcgcctgcctaactgtcattacataatacgaactaaggctggacaaggcggagttaaagaaataacgacattgcctgatcaagaatgtgatcgtgagatttcctgcctggtaactacttctaactattactacatcacgcataaagccagtgagaatattcaccatgtccagcatcattatcgccaatatattaagtatcgctctaaaaatacccaggatctaagctgggattttggcgagttatgcacaataaaatttcgagcctgcaaatttagaattaatgatgccaaatcaggcaaagaagaatgggaagttgtgctaaccaatcttgatcgaaaaaattatccgctaaaaagaattaaagagctttatcatctgcgttggggtattgagacctccttcaagaaattgaagtattctttaggcagtgtacagttccattccaaacaagataaatttattgaaatggaaatttatgcccatatgattatgtttaatgcaatcagtcaaattgatgcacaggcctatattccgcaaaagcattgcaagtatcaatatgccatcaatttcaagcaatcatgcttgattattcagagcatgtatttggcttcttctttaacgcaagattttgaacggatccttattcagatcagctattataccattccaattagaccaggccgcaaggacaagagaaatattaagcccaaatcagctgtatattatttatatcgcgtagcttaaaaaagcagaatctgtgctatgccttatttgttgtacgaaaaaagcaccaatttaaccaattaaatgttaaatcagtgctttaaaagtctaatattaattgtcaatgtcttaacttaatgacattggaaatgttctaactgacttttttgtttcatgtgaaactaattatttttcttcataccattcggtgtggaagacgccttcacgatcatttctaaggtaagtgtgcgcaccgaagtagtcacgttggccttggatcatattagctggcaagtttggattaaagattgattccaaccagttaagagctgcgctcaaagttggagttggcacaccacacttagtagcaaattcaactgacttacgcaaagctggcaagttttccttcatcaaaccgcggaaataatcgtcttggaataggttcattagcttgccgttcttgtcataggctttttcaatatccttaagcattgcggaacgaatgatacaacctgcttcccaatcttgagcaattgacttgtatcttaagtcccaatcataagcttcagcagccattgtcaattgttggaaaccttgagcataggcaacagcttgggctaattgcaatgatttttcgaatacgtcaaccatatcatcaggaatttcaccattgtattcaaacttagttggtttaacgcccttttcaattgtcaagtgtgcttgcttactcatgaaacgtgccattacagcctcggctaccaccgttacaggagcgccaagtgcaacaccatcttcgagcatccagttaccagtacctttgtatgaagcaacgttcaaaatgtgatcgattacgtgatctggcgttaaatcatctttttgtgccaaaacctttgaagtgatttcgctaagatatgcttctaccttaccatgattccatttatcaaaaatttctgacatttcatcatcgctcttgtgagcaacgtcacggagtaagttgtaaacttctgaaaattcctgcataataccgtattcgataccattgtgcaccattttgacatagtgaccagcaccttcaggtcccatgtagtagacacatggcttgccttcagtattcttagcggcaatagcttcaagaattggagcaacttccttataggctggttcatcaccacctggcatcaaagctggaccattcaaggcaccctcttcaccaccggaaacacccataccaataaaatgaatgccgtgcttttccatttcgtggaaacgacggttagtatcgtgataatttgagttaccaccatcgattaaaatatcgcctttatccaaaagcggcagcaatttttgcaaagtttggtccactggatcgcctgccataatttgaatcaaaatcttgcgtggcttttcaagtgagtttacgaactcttcccaggtgtagcaaggctttaatttatcatcttcatattttgcgaaagcatcaacttctggtttgtcgattgagaaaccggaaacggagaagccgtggtttctaacattcaaagcaaggttcttgcccataacagacaaaccgataacgccgaattgttgcatgtttattaattcctccattaatcaaagttcatcaagtattattatacgttctagcacgcaaaaaagcgaaaccaaaaggttccgctttttaaaatctagttaataatttttttgttattgggtaaaggtgtttcacacactgctcggtaatatttcctaggaaatattacttttattgatcaataccccaaagtaaaatgttaaatgctaatggtaatgttagcttggtaatgtatccatcctttttagcctgttttaaagatgctagaacaaatttacgttgttgacccgttagctttttggctactttaacagctaaattaaagtcatactcgttttttctaatagcatttttgataactatctttgcccacagaaataggttgagaatcggagtttacagttacaatgtagctccacttgctaagtcgaggaatatttttaattgttatagctttatcaaacttagctactgcagttgaattgctgttgtctgcagcgttggcagtgacagacgatgctgaaaataatgctgcaagtaaagcagtagcaagtaaactaattagagcttttttagatttcataatttagcatctttttacacatagtgcttattggctaataagcattaattcatatccaacactgtctattataagcatctgtattctatttactagccaacaaactattttatatttaaaatcgtatataaaatgaggctatttcccaggaaatattttcccatacaaaaaaagcgggacaaacgtctcgcttctttataattactcaaccaaattagtgttgtgaagcacctgaaaccgtatcaggagcaggatcctcttctggttctgattcttcatgttgagatgcacctgttgcagcgtcagcttctaagccgtacttttctgcaaagtaactgaatggcttcaagtcttcagcttgatacttcttgacaaaggctgggtcgtcaagtgagttcaactcagttgagtaaggcatttcgtgagtgtacttgacgtcgatcaacattggaccgtccatcttcttgaattcgtcgacagcatcttcgaattccttcttggtgcgaaccgttacacccttaacattcataccttcagcaacctttgcccagtcgttatcagggataataacaccagataatggttggtgagattcatcttcttgttctgcttgaatgtaacctagtgtttcgttagtaaatacaatattcaaaacatgcatgttgtaacgagccatagtaagaagttcttggttcatcatagcaaaaccaccgtcaccagctaattgccatacttcacggtctgggtaaacagttgctgcagtaagagcagctggagcaccataacccatagttgcgtgcaagcctgaagtagtccacttttgatcatcatgcaagttcaaaagacggcatgagtcaacgttaacgttaccaacatcaatagcaaagatggcgttgtcatcagccttcttgttgataacatcccagattggttcaggacgtacaggcatttcatctgagttcttaaagcttgcttgccatgcatcccagttctcacggtctgcaatagcagccttgtaaagtggtgattcgctacgttcttcaccagcgtcaataattgctctcaaagccttcttagcatctgcaagcattgaaacatcagttgagtgacgcttaccaaacttagctgaatcaacatcaatttggataaccttagcgttcttagggaaccataaaactgagaatggtgagttgttacctacccaaacaactaagtcagttgcgctttggacttcttgagcagccttaggtccgatacggccgatagtacccatgtatgctgggaatttgtcttctactacacccttgcctaagtatgatgacataataggggtcttgaacttttcagcaaattccttaacttcttcaccagcatcctttgcacctaaaccaatgtacatggttgggttcttagcttctttcaaaagcttaacagcttcttcaactgaagccttagttggtgctggataattgtctgctggatgagcatccttgtttacacggaaggtgtcatcaatcttttgccaaccgtagtccttaggaataatgataactgcaggaccctttcttgcgtaggcttgacggatagcttcatcagttaaaattggaatttgttcagcggtcttagcttggcggcaccaaacactagcgttcaagaaccacttgtcttcatcaaaagcttggaagaagtcaatatcttgacggctagttggaacgttagcaacaattgctaccattggagtcttgtcaaacttagcatcatacaaaccattgaataagtgggcagcaccaggaccagctgaaccgaaacatacacccaacttaccagttaacttatattctgcagaagcagctaaagcaccagcttcttcgtgacgtacttcaataaatttcatcttatctctaaagtcatagatagcgttcatacttgagtcgaatgaaccacctgggaaaccgtagatatgatcaattccccaatcgtaaataactttaagcattgcatcagaaccattaatttttgtcatataagtgcatctccttaacttttgttctttcataatgtattaaaacactttttttcacatttgcaaaccgataaaatcaccgttattacgcaaatgaaaacgcttttgtaataataatcacttcacaagctttaccaaattcaatatctcaaaaagctgaatggtagcgttttatattgtgatttgatgaacattattatactaaatttcacttattttatgtatattcattgttacttatagtaaaaatttaagaaaaaattttttacaatttatttcatagctatccaatttagaaaaacgttattttataattttgcgcataaaaataacgtagaatactattcctacgctatttttgtgctattctactttttcactctagagtaacgcccattttgaatgtaaacactcaagattgccaagtcagctgggttaactcctgaaattcgttctgcttgagctaaagtttcaggacgaattttttcaaatttttgccgtgcctcagtagctaaaccttcgatttggtcataatcaatatctgctgggatttttttggcttcttgtctctttaagcgagcaattctggtttcttctttcttgatatagccagcatacttgataccaatctcaacttgttctttaacgtaacgatcgcctggaactttttcaccagttaaccgttcaatatcagcaatagtaacattagggcgacgcaagaaaacatcggccttaacaccggccttcattggttcctgaccaatactttgcaaaaattcctgcacctcatcagttaaatgaaccgtaatttcatgcagtctcgtctttgcatcttcaatcgcatgcttcttttcttcaaatcgtgcgaagcgttcgtcagaaattaagcccagatcatgaccatattcagtcaaacgcaagtctgcgttatcattgcgtaaaatcaaacgatattctgctctactagtaagtagacgatatggttcattcgtccctttggttaccaagtcatcgattaacacgccaatgtaagcatcgttacggcctaaggtaaatcctggcttatcttgagcagataatgccgcattaattcctgcaattaaaccttgaccagctgcttcttcataacctgatgttccattcatctggcctgcagtaaataaatgctttacgtttttggtttccaaagtatgcttcaattgccatggttcaaccacatcgtattcaattgcatatcctggtcgcatcatttccgcatgttctaatcccgcaacagaatgaatcatctttaattgaatttcttctggcattgaagttgaaaagtcgcctacataaacttccttggtagtctttccttctggttcaaggaaaatttggtggcgatccttatctgcaaagcggacaactttgtcttcaattgaaggacaataacgtgggcctacacccttgataattccagagaacatcggtgcacggtcaagattgtttctaataatcgtgtgtgtggttggattagtataagtcatccaacaagaaatttgtttttgtaaataatcttcatcacgactttcatatgaaaagtgccgtgggattttatcaccaggttcttcctcagttttagaatagtcaattgtattgccgttaacacgtggaggagtaccggttttaaaacgacgcagcttaaaacctaacttttctagattttccgacagcttaattgaaggagtagtgttatttggacctgaagaataagtcaattccccaataataattttaccgcgagccgctgtacctgtagtcaaaacaacgcttttagcatgatacttcgcaccagtattggtaatcacacctttgcagacgccatcttcaactaccaattcatccacgatagcctgacgcaaggtcaagttgggcgtattttcgatcgtatccttcatgtgttcatgatattgccacttatcagcttgagcacgtagcgcacgcacagctggccccttacccgtatttaacatccgcatttggatataggtagcatcaatgttctttcccatttgaccacctaaagcatcaatctcacggacaactgtccctttagctggtccaccaacagatggattacatggcataaaggccaccatatccaaaccaatcgtaaccagcaaagttttttgtcccatgtgggcacttgccaacgcagcttcacatccagcatgcccagcaccgacaacgattacatcatattcatttgaatcatatgttttaaccattttcatcctactttcctaaacagaattgactaaataattgcgtgattaattcatctggggcactttcaccagtgatttcacctaaagtatcccaagcaccagtaaaatcaatttgtgcaatatcaacagggacgccatcttcaactgcttgaattacatcttccaattctttcttagccttatgcaataaggaagcttggcgttgattggttaccataatttgatcattagaattttcaatcccagcaaaaaatagcttattaatcaattcttcaagcgcatctaagttttgttctttcaaaatcgaagttgaaataacatcactacccgttagtttctccatctcagtagttgttattttttgacctaaatccgacttatttaagatcacgattcgcttcttgtcctttgttgcttcaattaaggcttgatcttcagctgttaatgcttgactagcatcgattaacaacaagaccagatctgctcgctccaaggccttttttgatctttctacaccaattttttccaccttatcttcagtgtggtggattccagcagtatcaattagctctagcggtactccttttacagacacatattcttctaacgtatcacgcgttgttccagccacatcggtcacaatcgctttgtcgctttgagtcagataattcaataaagaagactttcccacattaggacgaccaacaattgcagtagccaaaccattgcgcaagatttttccttcttgtgctgtcttcaataagcgattaattttatcaattactgatctagatgtgtctgccatctgttttgcggtaacagtatctgcatcatactctggataatcgatattaacctcaacgttagccaaagtattcagaatttcctgccgcattgcctgaatcttgtgtaacaatccaccagctaattgaccaacagccacttgtcgtgccttatccgtcttggcccgaacgatatccatcacactctcagcttgagttaagtcaattcgtccgttcacaaaagcacgtttagtaaattcaccaggatcagccattcgcgcaccgtgactcagcaacaattgtaaaatatgattagttaccacgattccgccatggcaattgatttctacaatatcttcacgtgtaaaggtcttgggcgcacgcagcactgtcaccattgcttcatcaatcgttttcccagtatccggatcgataatatgaccatagtgaatagtatgtgtcggcaccttgcttagatcttcgcctttaaaaacctcatcagcaatcttaattgcatcctcaccagacattcttacgattgaaattccgccttcaccgatgggggttgaaattgctgcaatagtatcgaactctgtcaaagtttgagccataattcttcccttttctcaataaaaaaagcgcattataccaccacgaataaccatgatggataaagcactttgactactttatctaaaaatcattttagactaatattcttttatttctttttgcgtcctaaacgcttgtaagcccttcttagtttacgtttgcgttcacgctcagcctcagcctttgcttcttgctctcttctatatttaatagggttttgcaagataaaggtttgaagcgcctggaacaagttggaaattacccagtaaagtgtaatagctgactggaagtttaaggccatcacaccaaccatgatagacattccgtacatcattactttggtcattccattttgcgatgattttggcgtcgataattgactaatatacgtcgataagaacgtaaagatcattgctaaaataggcatgatgtaatatggatcgggcttgcttaaatccatccataagaagcgcccagtttgtaactgcggtgtacgtaaaatcgcaccatacagtgcatacataactggcaactggatcaggacaggcaaacatccagtataaggatttacgcctgcttctttataaagcttgttagtttcttgttgtaataatgttcttgattcagtgtcacgtcctggatatttcttacgcaactcattaatttgtggttggatgctttgcatcttagtagtacttcgaattgaaatagcattcaaaggtactaagatgacacgaacaatgacggtgaagacaataattgcccagccataactgttccccattaacttagctagccacaaaataaaagctgacatgtaataaacgatccaacggtcccaccaattaccacttgtatgtgagattggcgttgcttgaccatttgctcccgtagtagcacatcctgtcaatacaacagcaagtattgctactgctaagactgcaagaagacgtttgacatttctcttggtcagaatgtccttcaatctatttttcctcaactttatctggcatttcttcaataatatgagctaacgataatgcgtgaagcaagtttttacgcacctgagccatattaaaatcgcgagcataaggtcgcgtaatgactaaaaaatcaacatgcggattaatctgcaatttttcttcatcaatcacggcccgaatataacgcttgagtcgattacgtgcgactgcggtatgaccaacctttttgcccacagaaattcctactcgaaagtgtttattttctgttttttctaccttataaatgacaaaagctcggttagcgactgagtcgccagattcgaaaacttgctggaaatctttttcagattttactcgataagactttctcaaaacgtttcattccactctagtagactaaaaaaacaactgggattcagtggtttaagcagataagacttttctaccttttgcacggcgtcttgctaaaaccttacggccatttgatgtgctcatacgcttcataaaaccgtgaacacgtgaacggtgacgcttcttaggttggtaagttctcttagttgtcatattaaactgcacctccataaatttttgtgccaattgcacaatttcttattaaggatagcacgaaaagccataaaaaccaagtattttaagaaaaaaagactcctgaattgtcaaattaagtgcaacagttaggctatgaaggaacgtattgcttgaagagttcttctgctgtgtgatattggaggattcgacgatgtttgcggttaatggcatcagttgcctgttgaacataagcagctgacttatctttcatgcttttgcccttagggaagaattgacgcagaagtccattgcagttctcatttgtgcctctttcccaaggagaatatggatgagcaaagtagatctgacatcctttgattttggtcatatccgcaaactcagaaccattgtcaaacgtaattgatttaaaccaattaggatgtctgtcaatctccttttgaagcagtctttgacaagtactggcccgatagtcaggaattttgataacaacctcaaaacgagtggttctttcagtcagtgtcattaaggcaggttgatttttacgtctgacgcctttaaccaaatcgccttcccagtgcaggggaacttttctgttttcaacttctttaggccgctgttcaatcgaattgccaagattctttttatgcggagcatggccaccatgactatgatggcgtttgtttctgcgtcttttaagcttcattggcaggtcgatattgcttatatccagcaatccttgatcaatataacgatagacagtgggcgtgctaggacatggataatttggcataatcctgtgaaattcaccaacgaattcatcaatgctggtggcatcaaatttggctttaaagcgtctgcttagcattctgaaaaagacggcatagtgttgcagtggattacacttatagcagtttctgcggcgcttttcatgataaatttgtgcagtatcagcgtaatagtgctcatacaagacatagctgctgtctctttgcaggacactgcctcgtctaatttcacggctgatagttgatttatgacagcctacttcttgagcgatagcattgcaggaggttatgccagaatcaagcagagcttgaatttgtccacgttgttcgctgttcaattgatgataatgcttggaaatgctagaatttgagttggtcatgaagatcttcctttcttgatttttggtcacttcaagtttaggtcttcatggcctttttgtttaacacttagtgttgcacttcaattttaaatccgggagaaaaaaagacttttaaatcccgtgaatattttctaaaaattgattgtttttcatgtggataaaaaataaaatatttttcttacgtataatttccacaagataattcccaacgttttccacaactcacatggtgttaaaaacttaattcacaccatgtggataacgcatatggtattttacctcaagtattgatagaatagtatccataattcacagctgtactgtgcataaattaacagttttgctcttatcatgtcaaaatgtacatatcactttaatagttatcaacaggctgtgtactttgttgatttctttttcacctgtggaaaaccagttaagtaaatggtaaaataaatttgctttttactaactgggggaatgtaca
